United States Patent Application Publication US 2026/0357256 A1 - sequence listing, part 19

SEQ ID NO: 9 - DNA, 58617616 bp, Homo sapiens (residues 39,078,415-41,249,437 of 58,617,616)
  source 1..58617616: mol_type = genomic DNA
tataacaagtgctgtttttaccacaggtcttagttcattacatccattcattcactcatctaattctcacaactctctaaaatacgtcaaatatacagcatggtttattatccccattttgcagatgtggaaattgaggcacagagaggcaaatggctcacagctactcaatgctggagctgggtttaaacgcaagctgtctgtctccaaagccctggcttttttccatggatggcatctctcagattgggtaaagtaaaccacacaatggaatattatgagccagtatcaaagaatgcttagaagagtccagtaaaaataacgtcagactgtggtatgaccgtgattcagcccaattcctgtgtacaagaaaaaatgctccaagcattctcaatggccactgagtgattgaatgaaatcttttgtaaataattgtggctattatctatggagctctttcttgatcagccccaccccgtgttacacgttttacttgctgtatctttccaagcatttgcaaagtaggcactgttgtatcagttttagatattaggtcactgaggctaacacaagagcagacactcacccaaggttacccagtcacaaagtggcagaaccagaattcaaacccaggtttgtggctatgcacagtgactcacgcctataatcccagcattttgggaggctgaggtgggaggattgcttgaggacaggagtttgaggtcacagtgagctatgattgcatgattacaccaatgcactccagcctgggtgacagagtgagaccctgtctccaaaaacaaaaacaaaacccaggtttgttagttccttgagccatgaaacctccctggctctttctaagttttcagtaatgagatgtgaatattttcttttttctttttattttttgagacggagtctgactctgtcgcccaggctggagtgcaatagtgtgatctcagctcactgcaatctccgcctcccgggttcaagcgattctcctgcctcagcctcctgagtagctaggattacaggcgctcactaccatgcctggcaaatttttgtatttttggtagagatggggtttcaccacgttggccaggctggtctcgaactcctgcccccgtgatctgcccaccttggcctcccaaagtgctgggattacaggctggccaatgatgctactattttcataatggagaaatagtttttaaagaagtctccttaagaaagtagactcatttatttttattttattagctatgtgcattactttgataaaatttaaaaccctaacttacaccgtacacaaaaatcagttccagatagattgccaacctaagggtaactcacatgagaaagctattggaaaataacagaagaggccagatgcggtggctcactcctgtaatgccaacagtttgggaggtcaaagcaggaggatcacttgagtccaggagttcaagaccagcctggggaatatggcaagaccttgtccctacaaaaaaattaacaaaattagctgggcgtggtgcacgcacctgtaatcccagcactttgggaggtcgaggcgggtggatcacctgaggtcaggggttcgagaccagcctggccaacatggtgaaacccccgtctctgcctaaaatacaaaaattagccgggcatggtggcaggcgcctgtaatcacagctactcgggaggctgaggcagaatagcctgaacccgggaggcagaggttgcagtgagccgagatcatgccattgcactccagcctgggcaacagagtgagactctgtctcaaataaataaataaataaaaatagaaataaacaaaattagccaggcatggtggtggtgcatgcctgtggtcccagctactgggaggctgaggtgggaggattgcttgagccagggaggtagaggctgcagtgagctatgatgccactgcactacagcctaggtgacagagcaagaccctttatctaaaaaataaaataaaataaaaataaataaaccaataaaaatggacaacccagtagaaaaccggacaagacacttgaacaagcacatcacaaaaaggatatccaaaaggctgatatgcaaatgaagagatgttcaatttcattactcagcagggaaatgcaaattaaagctacaatgagctacctctacacacccaccagaatgactaaaaataaagcacctgacaatgctttattggttccaagtgttggcagcgatgtggaacaatggaagtgttctaacgtggctggtgggaggagaagaaataccactttggaaacctctttggctgtatctaccaaagataaagatacatgcaccttatgacccagccatcttatacttctagtttacatccaagagaaatgtgtatatatgtttaacaaaatatgtactagaatgttgatcacagcactatttgcaaaagccgaaaaaaaaggaagtaactcaaaattccattgacaattggttttgatagataaaccaactgataaataaattgataaataaaccactgatggctgggcacggtggctcacgcctgtaatcccagcactttgggaggctgaggcaggcggatcacctgaggtcgggagttcgaaatcagcctggccaacatggtgaaaccttatctctactaaaaaatacaaaattagctaggtgtggtggtgcatgcctgtgatcccagctactcaggaggctgaggcaggagaatcgcttgaacctgggaggcggaggttgcagtgagccaagatcaccccattgcactccagcctgggcaacaagaacgaaactccgtctcaaaagaacaaaacaaaaacaaaaacaaacaaacaaaaaaccaccagtgatacataaattggggtgtattcacacagtggagggctgcttggcaatgagaaagaaaatgggttgcaattatgcgcccaactcagatacatttcccaatcataaagttgagtgaaagagttaaacctgtatatttctatttacgccatgtgcaaaaataggcaaaatgaaaccactgtgtgtagggaggtgtacttaggtggggaaaccaaagtcaggtaaaagttaagtggatttcttcatgggaaggaagaaagctgtgctggagaggaagcaggagggggcttgggggaaggcgataagattatttttcttgcacccggttggtggttacacagttgtgttcactttgtcatatttattcagtgggacatttatgtctcattacttttctgcatgtatatcacatttcataatttaaaaggtttaaattgactgggcacagcagctcacacctgtaatcccggcactttgggaggccgaggtgggcagatcacttgagtctaggagttcgagaccagcctggccaacacagtgaaaccccgtctctactaaaaatacaaggccgggcgcggtggctcacgcctgcagtcccagcactttgggaggccgaggcgggcggatcacgccgtcagaagatcaagaccatcctggctaacaaggtgaaaccctgtctctactaaaaatacaaaaaattagctgggtgtggcggcacgtgcctgtagtcccagctacttgggaggctgaggcaggagaatggctagaacccgggaggtggagtttgcggtgagccgagatcacaccactgcactccagcctgggggacagagtaaagtgacttagaaaactaggcttattaaaactctgccttacaaactgggcagactagatgtcttggtaataattagaagattattatcaataatcttctaattattataatgataattagaagattatacgggggcacttgctctgtgctaggcactgttctaaggggtttattatttaatccttgcaacaaccctataaggtgctactattgttcccatttcacagatggggaaaccgaggcaccgtgcggttaaatcacttgtctaagttagtcagtgctgaagatagatttataaccaggccatctagccccagagtcgatgctccattccccaccgcaagcttatacctgagctataagccctcatccgccagtcagggtccaaccagaggcaactccagtgggctcttttcacctgggctggtggttgggaattcaggagctacgtgaacttggataggggaaactttttttacctctccttttactacactttaatctagcagttctcaaaatgtggtctgggggcacctgtgggtccgcaagacctttctcaggggctagtgaggtcaaaagtattttcataatgatattaagacgtttgtccttttcattctccagagactacctgacctgtgataatgtcatcactctgatggctaatagaaatatatgcatgtatattcgtgtgtttttaaaacttctcgttttcagccaggttcatgcctgtagtcccagctactcgggaggctgaggctcgaaaatcgcatgaacccaggaggcagaggttgtaatgagccaagatcgtgttactgtgctccagcctgggcaacagagtgaaactctgtctcaaaacaaaaacaaaacacacacacacacaaaaccaaaaaacaaacacaaaaacaaaacaacaacaacaaaaaaaccccccaacaccttgtatcacaatagcactggtttcctttgtatttctgtgtatttatattatgcatgtaacgacatgatcctgagaagggcttgaccagcttgccataggcatctttagcacaaaaaagcttaggaacctcccattctggacgaactaagaatacggggaggttataattgggggccacaggagtggcaggtactcaagtttggttatgagagctactttcattatattttaggctgtaatggagactctggaagtgggaagaaaaaaaaaaaaactcaaacagtgcaaagggctcgttttgattttcccacactcctagtgccaatttctgaaattggtgtccacaatcagtagaagcctatgtgctctgaatttacaaagccaagtggtggcgggtcattgtatctgcagtcaggaaggggaaacgactggaaatccgggcccccccagttcttccctgcttctctttttgtggcagccgctcctcacgttcaaacagattgcaaaggtttacaggggagaaccctaacttgttccctagacgtcagtttctggagttcctgcattaatacgattaaaaagaacagctgattcttatccagcccttactctgggccgggccctgttatcggcatgaaatttcatgcagcaactcgtttactcctcacaacagcccacggggtatatacgagcatcacctcctttttacaggtgaaaaaacccaaggtccagcgaggttgaataactcacctaggtcgcacagctcagaaagcccactgcaattccgggattctggttttgttttgaggttgccccgggcttctgaggaggggtcagtgggctcagcatggaaaggaaggaagccggaaggctggaggaagatgcagcgaggctggaaaggttggggatcccccggtcctgcacacctgggtacctggggatcgggcagggccaggataggggccggtgtccgtgccctggggctccccagctgatgagtgggcgcctgagggacgagcgcagggttacctgcctgggctctcacctggtggccggctcagaggtggcgcgccggagacgtatcataaccttcctgggtcccccttcccgcgccacgccctggtggggtgggcgggtgggtgtggggcgcccaggcaggaccggccggacctgtgggacccggggccctggctgtctagggaggctgtcaccccgaggcgaccggctcttccggggctgggacggctgtaggcggcaagaggcctcggcacccgcgaactcataaataccggggcggcgctggtggcgggagaggcgcgtgcgggcagccggcgcccccgagggtgagccggggtccgggagggcgtcccctttcccggatggtcccgacccggctccatcctggcagctggagacggagctggagcaggcgggaaagcgctggagagaaggggggtgggtacagatgggggaagggcagggacgctggggatggggagagaggatgcggccgctctggccatgatgggctctaaaggatctgggggtggtgtgggaggattggggtcactaggagcaaaatagaaggctaaggatggagtagggaggcgaggtcccgggggcaggcgggaatgcttggaatctcgggagtaggtaggagaactggggtttctaacagcaggatggaaagctggggatggggctgcggaatgcaacctcctacacagcctccaccccgctcccagacccccagcactgagagtgagctctggttaggagcaaggctctggaatcaggccctcctgggttcaaatcctggctccatcccatcctagctgtgcagctgaatcactcagctgctcggtttcctcatctgtgatatggggatgacaatgctcacagccaccacttcatagcaatgtcgtgaggcttccgtgaattaatctatgtcaagcggttggcacactgtgagtgaggctcagagagctctgctgctgttccttagcgattcttatttttggtttctctctccagcacctggataaccacccatcttgaaggagacctccctgccctgcctctgttgtcccccagagcactgcctgatcatcctctgttccccatcctcccagcccttcctgctgtacctgtggggagctgatctcctcagtccccctgcttttccccggtctgccatcaccaccccaccaccatgcacccccttcctggctactggtcctgttactgtctactcctgctattctccttgggagtccaggggtccctgggggctcccagcgctgccccagagcaagtccatctgtcttacccaggtaagtgtccctgactcatttctatgcctctaccagagaggcccagcggtgcttcgttgtttgagggctcaggaatcccacactgtgagcccctaggcgggtggctcattcctcctgagcctccatcatccacctctgtggaataggaagtacaggctgtggaacacctggaagtgtggggaatgatcatggtgctcagcccacagagagtgctcccctgctctcaaaaggggaccgctgctgtccttgttcattgcatctctgttgtgtttccgggacctggcacgtttgttcgttcatgcacggtaggcctcagagccagttgtggaaggaaccagtggatgaatgataacagagctgggttacccagccccttctccatccctcttctcctcttccccacgaggctgactgcctcccgatctttgattaggatccttccactgtgggagtaagagcttggactctggaccattggcacccagaccacgtgggttagaatcccagctttgctatgtacctgctgcctaatcttgggcaagtggcttaacctctctgtcctcagtctcctcatctggataatggggtaatattagtacaacctcatggtgaggtgtaaatgagttgctacctgtaaaggggcagaactgaggctgagtgtgggggctcacacctgtagtcttagcagtttgggaggctgaggcggaaggatcacttgagctcatgagtttgggaccagcctaggaaacatagtgagacctctgcctcttagggaaaaagaaaaaatcttagacaggtgtggtggcatgcacctatagtcccagctacttgggagactgaggtgggaggatcgcttgagcccaggagttcaaggctgcagtgagccatgattggccactacactccagcctgggcaacagagagagaccctgtctttaaaaaaaaaaatgtggaggaggccaggcacagtggtgcatgcctgtaatctcagcaatttgggacactgaggtgggtggatcacttgacctcaggggttcaagaccagcctgggtaacatgggtgaaacccggtctctacaaaaaaattaaaaaattagctgggcatggtggctcacgcctggtctcagctgcttggggagctgaggcaagaggatcgcttgagcccaggaggcaaaggttgcaatgagccaagatcatgccattacactccaacctggctgacagaatgaggccctgtctcaaaaaaaaaaaaggggggggggagggggatagaacggagcttggcatgtagcagcaatttccatacactttaaatctcaggactgtttgttttaaactgttaatctcaggaccattttacatcactaaattttatggagaactaaaatttatggagaagttcaaagagctttagtttatgtgcattacagctagcaatatttactaaataaggtattaaaactgaggcatttaaaattttttattgtcatttaaaattaacaataacaaacaccttcagtattaatgtatatgatatttttaaggaacaaactgtattttgcaaaagaagaaattgagtgaggaaagtggcattgacttgcatcttttaaaaatcttttatttatttatttatttttgagacagggtctcgctctgtcaaccaggctggagtgcagtggcacagtcttggctcactgcagcctctgccccgcagggttcaagtgattctcccacctcagcctcccgagtagctgggattacaggcacccaccaccccatacttggctaatttttgtattttttatacagatggaatttcaccatgttgcccaggctggtcttgaattcctaagctcaagcgatcctccagtctcggcctcccaaagtgctgggattacagacatgagccaccgcgccccgcctaaaatctctttagtatctggtttggtaactgacaactggattctcctcagatctgttttcattttagtctgttgtgatttgttgttttggattttgcctgtgaagaaaatctgttcttgcacagacatgtggttgaaacagggagaaaagttgcttgttttttgacacagggtttggctctgtcagggtttggcactggagtgcagtagcacaaacatggctcactgcaacctcaactccgagactcaagcgatcctcccacctcagtctcttgaatagctgggaccacaggggcatgacaccatgcccagctaattttgtttttttttttttttttttgagatggagcctcactctgttggccaggctgtagtgcaatggcatgatcttggctcactgcaagctccacctcctggtttcaagcgattctcctgcttcagcctcccaagtatctgggattacaggcatgcaccaccacacctggctaatttttgtatttttagtagagacggggtttcaccatgttggccaggctggcctcgaactcctgacctcaagtgatccacccacctctgcctcccaaaatgctgggattacaggcgtgagccaccgtgcctggctctagtcctactcttttctatctgtgccagttcctcagtcattccttatctttccttgtttttcatgtcttttacatcttcaaagaagatagtttcttctttttttttagatagggtctcactctgtcacccacgctggaatgcaatggcgcaatcatagcttactgcagcctctaacttctgggcacaagtgatcctcctgactcagcctcctgagtagctgggactacagacgtgcactaccatgcctggctaattctttttattttttgtagagacaaggtctcactatgttgtccaggctggtctcaaactcctgggctcaagtgatcctcccacctcagcaccccaaagtgctgggatgacaggggtgagccaccatgcccagcagagagagggtttcttaaaggttagttgcaatgtggaatcagaaaccacatgaatgaactggcttggcatttgccagcctagtgaccttggacaaagcgctttgcctggaggcctctgtaaaaatgggaaaggcagtaaaaacccatctcgtagtgctgctgtgacaatccagtgagatcatggctgtcctttttcagcctacacagtaacaatggcaaatacactcttataagtgctttagacggataactcatttaacctggtatcaaccttaagctgtaggtaccattgctactcccatttgacaagagagactcacagcaggggaagagtctgaccccagttcacacagcctgggaatctgaatgccggcaggctagctcagaagcccacgatctttgtgggtttgtttgtttgtttgtttgtttgtttgtttgttttgagacagagtctcactccgtcgcccaggctggagtgcagtggtgtggtcttggttcactgcaacctctgcctctcaggttcaagggattctcctgcctcagcctcccgagtagctgggactaccagcgcgcatcaccatgcctggctgatttttgtatttgtatttttgcatttttttttttttgagtcgtagtctcactctgttgcccaggctagagtgtagtggtgagatcttggctcactgcaacctctgcctcccaggttcaagcgattctcctgcctcagtctctcaagtagcttggactacaggtgcatgccaccacacccagctaatttttgtattttagtagggacggggtttcaccgtgttgcccaggctggtctcgaactcctgacctcaagtaatctacccacctcggcctcccaaagtgctgggattacaggcatgagccactgtacccggcccctaatttttgtatttttcagtagagatggggtttcaccatgttgggcaggttgatcttgaactcctggcctcaagtgatccacccgcctcggcctcccaaactgctgggattacaggtgtgagccaccatgcccggcctattttaaaacttttaaattttgtactacttttggatttagcagaaacattccaaaaatattacagagttcctgtctcccctcactcagtttcccctgatgttaacattttacgtaaccatgaacaatgattaaaactgagaaatcaagattggtacaatcctgttaactaaactacagatctcatttgaatttcacccgtttttctactaatgtccatttccccttccagaatccgatccaggatctcacattgcatttagctgttgtgcctccctagtctcctcccatctattagtttctcagtcttcccttgtctttcatgctcttggtattgccgagtaccgatcagctattttgtacagtatctctcgtttgggatttgtctgatactttctcaccactggaattaagttatgtatttttggcaagactatcatagatatgatgttgtgcccttcttggcgcatgatacgaagaatcaagatgtggctgtgacttattgctgtgacttattgatgttgaccctgattgtttcattaaggaggtgcctgctgggtttctccactataaagtaattattcttccctttgtagttaataaatatcttgagggagatggctcaagacaatgcaaatcccatttctcctcaatgtttgctcactaattttagcatcttgttaaaagatcctgctgataagtggatcttatcggcaacaattagtgtggtatttgcctaatggtgattttctaattttctaatgccctccttctttttttttctttttaaattttataacctttgttttgttttgtttttgagacggagtcttgctctgttgcccaagctggagtgcagtggcgcaatctcggctcactggaacctccacctcccaggttcaagcaattcttctgcctcagcctcctgagtagcggggattacaggcgcacgctgccatgcctggccaagtttttgtaatttagtagagacggggtttcactgtgttgcccaggctggtcttgaattcctgagctcaggcaatctgcctgcctcatcctcccaaagtgctaggattacaggcatgagccactgtgcccggccaataacttttaattaattaattaattaattttgagacagagtcttgctctgtcacccaggctggattgcagtggcgcgatctcagctcattgcaacccctacctcccgggctcaagtgaccctcatcacttctgcctcttgagtagctgggactacagggatgcaccactatgcctggcaatttttgtatttttgtagagacagagtttcaccatgttgcccaggctggtctggaactcctgggctcaagcaatccacctgcctcagcctcccaaagtgttgggattatagatgtgaactactcgcccagccttcccacttctttttttttttttttttggtctattgttcctattcaatatagtagctccttccatctaattgaaattttattataagaaagagctgtccctccctgctccctttattactttattcaatgatttatttacatcatggactcatggatatccattttattccatgggtgaaaaatctgatgttatgattgtcccagatttggtctctcagaattccttcagattgcgttctgtgttcttacaacaagcctccatcatttgtgagcacttcctcacttgatgacatcacaaatgattccaggctcctcttgtgtatttcctgttccatcctgggaagcacctatttcccacaataagttccagtttcttttctttctttttttttttttttgagatggaattttgctcttgtcacccaggctggagtacagtggcgtgatctcagctcacagcaacctccgcctcctgggttcaagcgattctcctgcctcagcctcccaagtagctgggactacaggcgtgcaccaccaagcccagctgatttttgtatttttagtagagacggggtttcaccatgccggtcaggctggtctcgaactcctgacctcatgatctgcctgcctcagcctcccaaagtgctgggattacaggcatgagccactgtgcccagccctccagttcctttttattggagtatttagaaactaagatctgggcactaggtgtgctcattgccactgggatgtcattgcttctagttcctctcaacaaacacagcgaggcaatacatgcatgtacacgaagctgcatattcacacatctatgtttgaatctgtataaaaattaattacctggttggccacagtggctcagcactttgggaggctgaggtgggtggatcacttgaggtcaggagttcaagaccagcctggccaacatagtgaaaccccatctctaccaaaactacaaaaaattagccaggcgtggtggtgtgtgcctgtaatcccagctactcaggaggctggggcaggagaatcacttgaacctgggaggcggaggttgcagtgaaccaagatcacaccactgtccctccagcctgggtaacagagcaagacaacaactaaaaaaataaaaaaataaaaaaattgaattaccatgagatcatactgatatccctgatttcagcccagcaccatgggtttattttagccttatctttccttatttgtaacttctttctctaacactcagaaacttcactctgtctacgatatatttatttgtttaatcctagtgtatacataaagcatgcggtggctcacacctgtaatctcagcactttgggaggcagaggcaggtggatcacctgaggtcaggagttcaagaccagcttggccaacatggtaaaacccggtctctactaaaaatacaaaaaattagccatgtgtgttggcagatgcctgtaatcccagctactttggaggctgaggcagaagaatcgcttcaacccgggaggcagaggttgcagtgagccgaaattgtgctattgcactccagccttggcaacaagtgcgaaactctgtatatatatatatatatatatatagcagttgcagaatcatttacaggtgtgcctgtgggaagcacacgatgccaaggtgacagcctttatgcacagtcctttttgtcttttgtcttgtaataatacccagttaggacactgtttcttgcggttattattcttcctcacccccttccatgtggttatgttatgcttttttttaatctggttaggtccacttattagtgtttctattccatattgggttccccccacaccctgatagttttaattatttattttgtgggtgtgtgagggaaatgtgaaacatgactatagttccaggagtcaaaattatacgaaaagcctgactcagaccagtgtctctgtttcttcatccctactactctttcccattcctcttttttttttttttttttttttttgagatggagtctcgctctgtcacccaggctggagtgctgtggtgtgatctcggctcactgcaaccttcgcctcccagattcaagcgattctcctgtctcagcctcctgagtagctgggactacaggtgtgtgccactacacccagctaatttttgtagttttggtagagatggggtttcactatgttggccaggttggtcttgaacttctgacctcaggtgatccacctgccttggcctcccaaagtgctgggattacaggcgtgagccaccgcgcctggcccccgtttctttcttttctttctttttttctttttctttctttctttctttccttcttccctcactcctttctttctttctctttctttctttctctccttccttccttccttctttctttgtttctttctttctctccctctctctctctttctctctctctctctttctttctttctctttctttttttcgagacggggtcttgctctgtcacccaggctggagtgcagtgagtggcacaatctcagctcactgcaacctccgcctcctgggttcaagtgattctcctgcctcagcctcctgagtagctggattacaggcacgcgccaccctgcccagctaatttttatagttttagtagagaccgggttttgccatatgggccaggctggtctcgaactcctgacctcaagtgacccaccttcctgagcctcccaaagtgctgggattgcaggcatgagccatcgcgcccagctaatttttgcatttttagtagagatggggtttcaccatgttggccaggctggtctcaaactcctggcctcaaagtgatctacccaccttggcctcccaaagtgctgggattacaggctgagccaccatgtctggcctcctcttttcttctacctcattttccactcatcccctgtaagtaattcatctctttagtacctggtgtaccctttctttatttcttttgtacaaatgaacagagacacctgcatattttctatacccccttacattaagggcagctaactatactcttatgcactttgctttttttggtttaacaatatgtcctggaaacatttcatagcagttcttggaacttgtcctcattcttttttacaccattgtgtggatgttattgagtcactctcctaaatatgggcatttaggttgtttcccgtattttgcaattacaaagagtactgccataaataaccctgagcacatgcatttttgtatggctggaggaagaactcttaacattacactacaccacacggtatttttaaaaccttgacttgggtgctaacgtttaagaatttgaagctatcacttcaaaatctggattttcgtatctatctgtatatgctcctgggatataaaaaccactgtgtaaagatatgttgtaggctgggcgtggtggctcacccaaagtgctgatcccagcactttgggaggcccaggtgggtggatcatgaggtcaggagttcgaggctagcctggccaacacggtgaaaccctgtctctactaaaaatacaaaaattagccgggcatggtggcacgcacctgtaatcccagctactcaggaggctgaggcaggagaatcacttcaacccaggaggtggaggttgcagtgagccaagattgcatcactacactccagcttgggcgacagagtgagacttagtctcaaaaaaaaaaaaaaagatgtgttctagaagtcaatagaaaagccgggcacatgttcacgcctgtaatcccagcactttgggagaccgaggagggagggttgctcaagtccaggagttcaagaccagcctgggcaacatggcaagatcccatctctatgaaaaaaaaaattaaaaatcaactgggcatgctggttcatgcctgtggtccgagctactcaggaggctgaggcgggaggatcacttgaacccaggaggcagggtatattagttttgatgctgttgataaagacatacctgagactgagaagaaaaacaggtttaattggacttacagttccacatggctggggaggcctgagaatcatgacaggaggtgaaaggcacttcttacatggtggtggcaagagaaaatgaggaaaagcagaagcagaaatccttgataaaaccctcagatctcatgagacttattcactaccacaagaactgcccccatgattcaaatgatctccctccacgtacctctcacaacatgtgggaattatgggtgtacaattcaagatgagatttgggtggggacacagagccaaaccatatcattttgcctctggcccctccaaatctcatgtcctcacatttcaaaaccaatcatgccttcccaacagtctcccaaggtcttaactcatttcagcattaacccaaaagtccacagtccaaagtctcatctgaggcaagtcaagacccttccacctatgagcctgtaaaatcaaaagcaagctagttacttcctagatacaatgggggtacaggtattgggtaaatacagccattccaaatgggagaaattggctaaaacaaaggcattacagggcccatgcaagtccaaaatccagcagggcagtcaaattttaaagctccaaaatgatttcctttgacttcaggcctcacatgcaggtctcactgatgcaagaggtgggttcccatggttgtgggcagctctgcccctgtggctttgcagggtatagcctccctcctggctgctttcacaggctggcattgagtttctgcagcttttccaggaacacagtgcaagctgttggtggatctacaattctggagtctggaggacagtggccctcttttcacagctccactaggtggtaacccagtagggactctgtgtgggggctccagccccacatttcccttctgcactgccctagcagaggttctccatgagagccccacccctacttctgcctgggcattcaggcgtttccatacatcttctgaaatctaggcagaggttcccaaaccccaattcttgacttctgcgcacctgcaggctcaaaaccatgtggaagctgccaaggcttggggattgcaccctctgaagccacggcccaagctctatgttgtccccttacagccacagctggagcagctagaatgcaagacaccaagtccctagactgcacacagcacagggaccctgggccctgcccatgaaaccattttttcctcctagacctctgggtctgagatgggaggggctgccgcaaaggtctctgacatgccctggagatattttccccattgtcttggggatgaacgttcatctcctcgttacttatgcaaatatctgcagccagtttgaatttctcctcagaaaatggggttttattttctatcccatcatcaggctgcaaattttctgaacttttatgctctgcttcccttttaaaactgaatgcctttaacaggacatcttgaatgctttgctgcttagaaatttcttccaccagataccctaaatcatctctctcaagttcaaagttccaataatctccagggcaggggcaaaatccaccagtctctttgctaaaagataacaagagtcacctttgctccagttcccaacaagttcctcatctccacctgagagcacctctgcctggatttcattgtccatatcattatcagtatttttgtcaaagccattcaacaagtctctaggaagttccaaattttcccacattttcctgtcttcttctgagccctctaaactttccgacctctgtctgttacccagttccaaagctgcttccacattttcaggtatcttttcagcaacaccccactctactggtaccagcttactatattagtccattttcatgctgctgataaagacatacccaagactgggaagaaaaagaggtttaattggacttacagttccatatggctggggaggcctcagaatcatggcagaaggtgaaagccatttcttttttctttctttctttctttttttgagacagacagagtcttgctctgttgccaggctggaatgcagtggcgtgctcttggctcacggcaacctccatctcccgggttcaagtgattctcctgcctcagccttccaagtagctgggactacaggcacatgccaccacgcccagctaatttttgtatttttagtagagatggggtttcaccatgttggccaggatggtctcgatctcctgacctcgtgatctgcccaccttggcctcccaaagtgctgggtttacaggcatgagccaatacacctggctagtgaaaagcatttctgacatggcggtggcaagagaaaatgagaaagaagcaaaagtggaaacccctgataaactcatcagatctcgtgagacttattcactaccatgagaacagtatgggggaaaccaccaccttgattcagtctcccactggtccctcccacaacacgtggggattacgggagtacaattcaagatgagatttgggtggggacacagagccaaaccatctcaccgaggttgcagtgagccgagaatgcgccattgcactccagcctaggcaacagggcaagactcctcaaaaaaaaaaaaaaattagctgggcatggtgacatgtgcctgtggtcccagctacttgggaggctgaggcaggaggatcgcttgagcccaggaggccaaggctgcagtgagctaagatggcaccactgcacctccagcctgggcaatagagtgagaccctatctctaagaaaaaaaaaaaaaaagtcaatagctttgctggtactgggcccgtttcctgcttgctttgtggctattgccagatctgagtgatggctgcccctttgagatagggcagggtctacagtcttggcctccagacacccaagctggcaacccttaaatgatatcatgtgtgtacaatagttggcacaagacctgcacacagtaaataatgatattaataataatactcattcccgcatataaccctaagtgtactaggtactgtttcacgtgctttatttatatttattcatctaagcctcataacaaccatatagggcagagactattatttttccattttacagacaggaaaactgaggctcagagaggtgaagtgatgtgccccaggaaagctcagcttagaaatggcagagctggctcatgcctgtaatcccagaactttgggaggccaaggtgggtggatcacctgaggtcagtagttcaagaccagcctggccaacatggcaaaactacatctctactaaaaatgcaaaaattagccaggcatggtggcacatgcttgtaatcccagctactcgggaggctgaggcaggagaatcgcttgaacctgcgaggcggcagagattgcagtaagctgagattgcaccactgtactccagcctaggaggcagagtaagaccctgactcaaaaaaaaaaaaaaaaaaaaaaaaaagaaaagaaaagaaaagaaaagaaatggcggggctgggattgaacttgggcagttccagaacctgtgtccttaaccactaactgttcaacagtggtcaacgcccctcactttttctgcatatccctcccaccctgcccaggcttcactcccggtctaccctctgtccctttctccccaggtgagccaggctccatgactgtaacttggaccacatgggtcccaacccgctctgaagtgcaattcgggttgcagccgtcggggcccctgcccctccgcgcccagggcaccttcgtcccctttgtggacgggggcattctccggcggaagctctacatacaccgagtcacgcttcgcaagctgctgccaggggttcagtatggtgagaggggccccaggctgagctgttgaggaggagtgggaagaggagtgggatgcagactagaagctaccactggccggtggctcaggctgggctggtaactccactgcctatctgcaagcctgttgtatgagaccccaggatgaaaacggaaggtgccggggaaggcagaccgaaggggcatgggccagcccccaccagtccccccatctcctcccctccaccagtcggggaaggatggggttggagggagggtcccggggcgccccagctgactgcgaccttttcctctcccattcagtttatcgctgtggcagtgcgcagggctggagccgtcggttccgcttcagggccctcaagaatggggcccactggagtccccgtctggctgtgtttggagacctgggggctgacaacccgaaggccgtcccccggctgcgcagggacacccagcagggcatgtatgacgccgttctccatgtgggtgaggcatccgcaggggcgcgcgcagggacggtggggggcgcgcgcagggatggtggggggcgcgcgggtcgggggcgcgcgggtcgggggcggtgctaggaccgtggaggggacagggctggggccagtgtgtctctgaagggacaggggatgagactggctacggagacggtgtctgtggccaaccagcctgcctaggttaaaatcccaactctggcgctcttgccaggagcaggggttttcccccgtatattttgattagagagaaagctggttccgagttcgcaggactgttgtgatgactacgttagttcgctttgcctcgcagggtgcaggtgcacttcggtgtccttgtgctggttattattattattgctgctgttgttatttaagagggggaagggaattagatgggtaatggggattggggattgtgtgcttcaaagtgcagactctggaatcaggctccctaggttttatttctacatcttcactagccagctgtgtgacctggggcctcagtttccccatctgaaatgggaataataataataatactcatcttgggccaggcgcagtggctcatgcctgtaattccagcactttgtgaggccaaggtgggtggatcacttgaggtcaggagttcgagaccagcccagccaacatggtgaaactccatctctactaaaactacaaaaattagccaggtgtggtggcaagtgtctgtaatcccagctgcttgggaggctgaggcaggagaaccgcttgaacccaggaggcagaggttgcagtgagccaagatggcaccactgcagtccagcctgggcagcagagggagactctgtctcaaaaaaaaaaaaaaaaaaaaaaagtgcccatcttggcccggcacagtggctcacacctgtaattccagcactttgggaagctggttttgaattcctgggctcaagtgatactcttgccttggcctcccgaagcgctgggattaacaggtgtgagtcaccatacctggctctctcaattccagtgaaagcagagctgggcctgggtcctcaccctccttccgccccctcccccaggagactttgcctacaacctggatcaggacaacgcccgtgttggggataggttcatgcggctcattgaacccgtggctgccagcctgccgtacatgacatgccctgggaatcatgaagaacgctagtgaggactgagggtggtggcggtgggcgagggctggatcaatggaaatggtctcgttcttcttagtgtctcccttgagtctctcatgctgcaacatttcaattgtggtagcaagaggagatgggggtgggctggaagctggactcagggcctgacagtggcggggtataggagtagggctatgaaattcagtccttcacctccatcccttgtacttcctttattccagcaacttctctaactacaaggctcgcttcagcatgccgggggataatgagggcctgtggtacaggtaatgtgggggtgctgggggactggccctctcccctgaaggatgggagatgcaggggagccctggtccctgacccctgccctttgactcctccagctgggatctgggtcccgcccacatcatctccttctccaccgaggtctatttctttctccattatggccgccacttggtacagaggcagtttcgctggctggagagcgacctccaggtaacctgggtggaggcccctatagtcccctggccagccccacctccccctccacccctgactcctagcccctcaccctgggcccttctccctagaaagccaataagaaccgggcagcccggccgtggatcatcactatggggcaccggcccatgtactgctccaacgcagatctggacgactgcacacgacatgaaagcaaggtgaggtccctccctgggagacagtggggacatgctgaaagccaggtgggcgtcagtctgcgtcaccctcacccgctcattcaccctgcccaggtccgcaaaggcctccaaggcaagctgtacgggttggaggatcttttctacaaatatggtgagcgaccctcaggacccatgccccacaccccacctctccccaattcagaggtctgatccccgcttgctctatctcaggagtggatctgcagctgtgggctcatgagcactcgtatgaacgactgtggccaatttacaactaccaggtgaggcacgtgaagggctgagcgcccacacagctggggtcagggtggtcagaaggcccaggcatggcctcgagtgactgcctgccacccaacgttgttcccttccccaggtatttaacggcagccgagagatgccctacaccaacccgcgagggcctgtccacatcatcacaggatctgctgtgagcagggggaagggtggctttgccttctctctctattcctatctatggagggctaactttgttccagactgagtgctgggtgctttatatagtggatatcacttaaccctcagccctaaggtcgggaactcctagcggtatgttcattggacggatgtaggaacagaggcacagacaggaaaatacttgctcaaagtcgcaggtcaaataagtggcagaggttgggagctcccccaccataaagttactctagttccctttttaattaataactaccatggaggtccaggcacaatgactcatgcctgtcatcctagcactttgggaggccgagtctggaggatcacttgaggccaggagttggagaccagcctggcaaatacagcaaaaccttgtctatacaaaaaaaaaaaaaaaattaaaaaagaaattagctgggcgaggtggtgcttgcttgtaattttagctattcaaaaagatgagtcaggaggattgcttgagtgcaggaggtcaaggctgtagtgagctgagatctcaccattgcactccagcctgggcaacaaaatgagaccctttctctcacacacacacacacacacacacacacacacacacacaaaagatactgggtggctaggtgcagtggctcattcctgtaatcccagtactttgggaggttgaggcaggaggattgcttgatcctaggagtttgaggctacaatgagttatgatcgcaccaatgcactctagcctgggtgacaaagcaagatcccatatctaaacaacaacaaaaaaactatcttgggggagatcctgttagaccatgcaaatgtcatgtttcttttttttttttcgagacggagtcttgctctgttgcccaggctggagttcagtggcatgatctcagctcactgcaacctccgcctcctggttcaagagatttccggctaatttttgtacttttggtagagatgggatttcaccacgttggccaggctggtctcaaactcctcacctcaagtgatctgcctgcctcggcctcccaaagtgctgggattacaggtttgcctggcccaaatgtcctgtttctcctcaaactttcaccctcttattttcaaacccattagtggacgctgcctgttaacagttattactaagctgttccaatgaagacttttctttctttctttctttctttctttctttctttctttctttctttctttctctctctctctctttctctctctctctttctttctttcttttcttcctccctcccttccttccttccttctttctttctttttttttgagacggagtttcactcttgtcacccaggctggagtgcagtggcacgatctcggctcaatgcaacctccacatcccgggatcaagcaattgtcttgcctcagcctctcaagtagctgggattacaggtgcccacccccatgcccggttaagttttatatttttagtagagatgaggtttcaccatgctggcgaggctggtctcaaactccggacctcgggtgatcagcccacctcggcctcccaaagtgctgggattacagacaagagccactgtgcccggccttacagtgccattctaatggggattttctgtcgccctcactcttccaagatttacgaattgagatcctcttgcaaggctgacttgtgtcttctgccacatttgttcagttggttaattgtttatttatgtccgtgtgaactcatgggtaatttattttactctgcgggttattatccaacatgagtgttatttatctggatgtttaagttgtgccagctttggccatcagtgggctcctgtctcctttccactcatcccctccttattctctggcacttcaaaacattccaggatcatcatgtgtttttttttttttttttttttttttgctcagccttagaatctaccccttctccatggagcgaggcttagttttttaattttttaatttaattttaaaaattttggccacatgcagtggctcacgcctataatcccaacactttgggaggctgaggcaggcaggtcacttgaggtcaggagtttcagaccagtctgggcaacatggtgaaaccccatcgctatcaaaaaatacaaaatttagccatgcgtggtggtgcacacctgtagtcccagctacttgggaggccaaaatgggaggatcatttgagcccaagaagtcaaagctgcaatgagctgagactgtgctactgcactctaacctggggacagagcgagaccccatctcaaaaacaaaaatgtttttaatagagacagtctcactatgttgcccaggctggtctcgaattcctgggcttaagtgatcccccagctcggccttccaaagctgcttcttacaaatgattaagagcaaagtgaggctgggtgcggtggctcatgcctgtaatgccagcactttgggaggctgaggtgggtggatcgcttgagtctaggagttcgagaccagcctgggcaacatgacaaaaccctgtttctggtaaaataataattattattatcattatatatatgtatacatatatataaaagtaagaatcacttgtaataaaaattcaaacagttacagagggcaggaggtgaacagaagccactcacaccacacattgccccactctcggttgttgactctttttaggcattttacaatgttctctgcatatacaaaggagtaattgtttagatagagacatgttactgtattgcttacttaaaaaaaaaagcacttagatcgtgggtcatgccctagtggttctcaaacttggtgcacatcagaattacctatggagctttcaaaagtccagtgcttgggcctgaccccggacaaaataccagaatccctggcattgatctcccagagtagctgccacacggagcatgaaatagaatgctgtgagcaccagatggcttctcacggcccttggcagccaggctctgcccatgggtgattgctattctgattttatcagcacaaattggtttttttctttaattaagaaatttgaggccgggcgcggtggcttacgcctgtaatctcaacactttgggaagctgaggcgggcagatcacccaaggttaggagtttgagatcagcctgcccaacatggcaaaaccccgtctctacttaaaacacaaaaaattagccgggcatggtggtgggcacctgtaatcccagctactcaggagggtgaggcaggagaatcgcttgaacccaggaggcggaggttgcagtgagccgagatcgtgccattgcactccagcctgggcaacaagagcaaaactctgtctcaaaaataaaaaagaaaaaataaattgaaattatttcagaccaacagaaaagttgcgctaacaatacaaggactttccatatccacttcaccaatatttcccaaatatgaacatttaaccacttttatttatttatttatttattttgagacacagtttcactattgttgcccaggctggagtgcaattggcgtgatctcggctcaccacaacctctgcctcccaggctcaagcgattctcccacctcagcctcctgagtagctgggattacaggcttacgtcaccacgcccggctaattattgtatttttagtagagacgggggtttcaccgtgttggccaggctggtctcgaactcctgacctcgtgatctgcccgcctcggcctcccaaagtgctaggattacagccatgagccactgtgcccggcgtctctttcattcctttcatcagaaacattctctactctttcttcatttttcatgaccttgacaattttgaaaagcacagcgagttgttttgtggaatttcctttgggtttgtttgatgtctgctcatgattagatagaagttgtgcatctttgctaagaatacacaaaacagatactgtgttcttcccaatacatcctgcaaggaggcgcatggtgtcttttttgagttaggatctcactctgtccccaaggctggagtacagtgttacaatctcggctcactacagcctggacctcccaggcttaagcaattctcccacctcagcctcctgagtagctgggattacaggcatgcaccaccacgcccagctaatttttgtattgacagggtttcgccatgttgcccaggctggtcttgaactcctgggctcaagcaatctgcccgcctcggcctcccagagtgctggaattacaggcgtgagccactgtgctcggctgcacgatgtctttttaacctctttgagcctctgatttctcagctgaaagtgtggtacggatgggtctcattactgatgatgcttactttgatcacttggttagggaggtatcagccagccatctccaccataaagtgactctcttttttcctttgtaattaacaagcatctcctggagagatactttgagactatgcaaacatcctgttatgcctcaaactttccctgctagttttatcatccattcatgatccttgcttcaatccagtactataatgctgggtgcaaaatggtgattttcctcaccctggcatcctctctgctcctcatgcctggcttttctgctgcaagcacgagcattctgtttccccaggcgctgttgttttaaaaagctttcttggagggtctactgtgcagccaggcttcagatccagtgatttctctgttcttcaaattgctttttctccttcacacacatcttggccatctttctgtatcaccccgcttccctgctttgcgatggctgtgctataatgtatttaactgactccctgatgggcgttgggatggcttccagttcagggctttcactgtaatgctgtagtgggcagccttacacagccgtgtacttttctagaagtcagagacccggagcaagggaagcctgcctgggacaaattgttcaattgtgagtattattgtggccaagtctttttgtttttgtttttgtttgagacagtgtcactccgtctcccaggctggaatgcagtggcacaatctcggctcactgcaacctccacctcctgggttcaagcaattatcctgcctcagcttcccaagtaggtgggagtacaggtgcccaccaccacaccaggctaatttttgtatttttagtagagacagggtttcaccatgttggccaggctggtctctgactcctgacctcaagtgatccgcccttcttggcctcccaaagtgctggaattacaggcatgagccactgcgcccggcctctatggtggtcaagtcttcactgtcttccttgagggcagcagggtcctgggctagcaggtcatttctgcttccccgcgggtcctccacctgctctgggtctgatcagttctccccgccccagggctgtgaggagcggctgacgccctttgctgtcttcccgaggccctggagtgccgtgcgtgtgaaggagtacgggtatacgcggctgcacatcctcaacgggacccacatccacatccagcaggtgtcggacgaccaggtcagtgaggggcaggccgaagtcacctgactgtacagccaggcccctccaagcaaatgagctgttaaaaacgtgggctcggccgggcgcagtggctcatgcctgcaacacctgcaatttggtggggctaaggtatgaggatcgcttgagtccaggagttcaagaccagcctgggtaccatggtgagacctagtctctacaaaaaatacaaaaaatggccaggcacggtggctcatgcctgtaattccagcactttgggaagccgaggcaggcggatcacaaggtcaggagatcgagaccatcctggctaacatggtgaaaccccttctctactaaaaatacaaaaaaaattagccaggcgtggtggcaggtgcctatagtcccagctactcgggaggctgaggcaggagaatggcgtgaacccgggaggcagagcttgcagtgagccgagatcgcaccactccagcctgggcgactgagcaagactctgtctcaaaaaaaaaaaaaaaaaaaaaattaggccaggtgcggtggttcatacctgaaatcccagcactttgggaggctgaggtgggcagatcacttgaagtcaggagttagagaccagcctggccaacatggtgaaaccccgtctctactaaaaatacaaaaatgagctggccatggtggcgggtgcctgtaatcccagctacaagggaggttgaggcaggagaatcacttaaatctgggaggtgaagtttgcagtgacccaagatggcaccactgccctccagcctgggagacagagtgagactctgtcttggaaaaaaaaggaaaattagtcaagtgtggtggcagatgtctgtagtcccagctacttgggaggctgaggcaggaggatcacttgagtgcaggagttagagtttgcagtgagctatgatctcgcctctgtactccagccttggcaacagagtgagaccctaactcaaaacaaaaaaacgaacaaatgtggactgtagaactagaaacctgctcctgctgcttaccagctgagtgaccttgagtcactcatctaattttttttttttttttttgagatggagtctcgctctgtcacccaggctggaatgcagtggtgcagtcttggtttactgcaaccgccacctcccaggttcaggcaattctcctacctcagcctcccgagtagctgggatcacaggcgcccaccaccacacccggctaattttttgtatttttagtagagacagggtttcactgtgttggccagaatggtctcgaactcctgacatcaggtgatctgcctgcctcaacctcccaaagtgctgggattacaggtgtgagccactgtgctgggcccacttatctaacttctttgcctcagttttcccatctgtgagaggggataatcatagtttccacctcacaggactacatgggggttgaaggacttattatatataaaatgcttagaagagtgcggaacttggtaaattctgtaggtatttaccattgtgaggcaggggaagataaagatggggggtgggacacaggtaggggaaaacaataagatgagtatgtggtacaggtggcttaaggttaggtggatccaaataataatggctcacctttctttatttttgccattgtagttttaaaataatgacaatatttatgatttattgagcacctactgcataccaggcactgcctagatgctctgcatttagtagcactttatttatttatttgtttttgagacagagtttcaccctgtcgcccaggctagagtgcagtggtgcaatctaagctcactgcaacctccacctcccaggttcaagcaattctcctgcctcagcctcccgagtagctgggattacaggcacatgccaccacacccggctaattttttgtatttttagtagagatggggtttcaccatgttagccaggctggtcttgaactcctgacctcaggtgatccacccacctgggcctcccaaagtgctgggattacaggcatgagccaccgcatgcggccccagtagcactttatacaccaaaacaatcccacaggagtggatttcctctccattttataggtgagggaactgaggctcagagaggggaagtaattttcccagggtcacacagttggaggacggccaagctgggatctgatagctaccatttatcgagtggcacatgcaccgggcgcagacttttgtgtgcatgatctcactctgttctcatgatgactctgggcatctattactttgtgcattgcatagaacatggaagttttgctcagagagtccagcaacatgcttaaggccacctagagggtggatgcgctggccaggtgcagcagctcatgcctttgggaggctgaggcaggcggatcacttgaggtcaggagttcgagaccagcctggccaacatggtgaaaccttgtctctagtaaaaatacaaaaattagccaggcatggtggtgcatgcctgtaatcccagctacttgggaggctggggcaggagaatggcttgaacctgggaagcggaggttgccactgcactccagcctgggtgacagagcaagactctgtctaaaaaaaaaaaaaaaaaaaaaaaaggagagagagagaaagagtggatgtgctggaatataaagcaaggtctgtctgactccagagtttgtgctctaataatagcctacacttacatagccctttccatatgctgggctctgtttacaaatactatctcatttaactcccacaacatctatgatgtgggtactgttactcttcctatcacttttcagatgaggaaaactgaggcccagagaggcctagccacttgctcagggttgtacagcccatcagagggcagagaggggactggaacccaggccatgtggccccagagttcaggctttcagctctaactactgtccctgtttttgtccctcacaggatgggaagatcgtagatgatgtctgggtggtgagacccctgtttggccggaggatgtacctctagggatggcggcagctctcctccagaagcctaggttttgccgccttggctgctgtgaccagaaactgcccaggcctgggtggggagttgggtgggccctgactcccctgccctccagaggccccatgtagggtacatgcagccctatggagctggggcagctgttccctcctggagaggtgggagtcctggctggctgtggagggagggcaggtgtgcgggcacagagtgacacacggcaggtttctgctggcagggccccaccctcctgcatagctctgatcgggcgaggtgcccacggggcttcaggaatgaagaggcttaagctctggctccatggattctgcacatctgcgggggatgccgctgggcttcctcctctcctgcccacctggcaagggcatcgccaggtgggcacaaccgtcatgacactactcaccagcaggtggcgtcaggggctttttcttctgagcccggcactgagagttggtctgaagcctggctccttcttcactgctccaggactgctatgaagagtcccttcatgcctcagtttcccagcctggcaccatcttattcgggaagaggagacgtgttaacactcttgcctcctagctaggacagatgacaaaccgcaagagccacagacttgccagttccttccctctttccttcctttctttcccttcttttatttattgaatcataatttattgagcatctaccatgtgccaggctctgttctcagtgctggagagacagctgtgaatgagacagagatctcggccctcacagagctgacatcctaaccagagagttggacaaaaatcacgataaatgagttggttaaatagcgatttgtgagtagaaaacgcagggacggtgagagagcagtttcaattttcagggggatctcactgagagggcaacatttgatctgaaggaggtggggaaggagccaagtgggcagacatctgggggaagagcattccaggcagaggaacagccagtgcaaaggccctgagacagaaatgtgcctggccggctgggtacagtaactcacatctgtagtcccagcactttgggaggccgaggcgggcagatcacttgagcccaggagtttgagaccagcctgggcaacacagcgaaaccctttctctaccaaaaatatgaaatttagctgggcatggtggtgtgtgcctgtagtcccagctgctcaggaggctgaggcgggaggatggcttgagcccaggaggttgaggctgcagtgagccatgattgcgccactgcaccccagcctgggcaacagagcaagaccctgtctcaaaaaatatatataaataaaaaagttttaaaaagagaaaaataaacaaagaaacgtgcctgccctgttggagtgtccacgaggaggccactgtggctggagcagggagagtgagagggagaccaagcttgaggacagggcagtggtggggatggcttgtatggagccttacaggccacggtgaggactttgggtggagccaggggaggctctgagcaggtgaaggaagtgatcggactccacgagtcacaggcaaaggccccagggctgacagctgccccagggcctgcgggctcccagccctgccagatgacctgagatctatctattcccccgtcatggggcgcggtttctgcctccacagatttcattccctcccacccgcccctcacttggcccaaggcacgcaggactccttgccgttcctggaacacagccagctctttctcactgcggggcctgggcgctggctgtctgccccctgtgtgccctctccccagctcatcccaggctggcgccttctcaacctcaggtctcagactcggtgtcccctcctcagaggccttccctgctgaccccagctaaagtagcctgtgttgctgcctgccccacccccgttttacttcgatctgcaattctttccttgattggttaacttgttcattggctgtttacacccgtaaagctaagtctgtgagggtggtgaccatgagttcaacgcctctgccaaatcctcccaggccccttcttgggctggattggggactctgggctccccgctagttccagtcctgcgcattctaggccatcaccgtttggggatgggtctctctgactcccccactggacttcaacctcagagggatggggcccagagctgcgtcccagcattgcccagcacaagatagatacttaataaatattgattgccttaatgaaggccaccacatgccaggctccagccgggcaatgccagggacagcgatgaatcagctacagtcatgccctctgggagctcgcaggcaggcagggaaacacggttactcaacacaggtgatgagcagtaagagaatcccgtggcgggccgggccaagacggtgaggtcacaagctggacggtcatggagtgctgtggccgccgactgaactggtgccctgtgtgggtctggcatgccctgtcccgggctgggtgaggctgtggacatgccgggaggtggcaacctccacagagggcagaggtcagacactggagtcaaacagaaactggttcaaatcccagccccaccaattcctgtgtgaccatgggcaagtcggcaaccctctctgaatctctgtttcttcatctataacccaagaatgataatactctgtgaggctgccttggggttaaatgagattgaaagccttgggatcgatattgattcctctttttctcatgctccacatccaagtatctggaaaatcctgtttgccttgccttcgaaatcgatctagactctttttttttttgacatggagtttcactcttctcgcccaggctggagtgcagtggtgtgatctcggctcactgcaaactctgcctcctgggttcaagcaattctcctgcctcagcctcccaagtagctgggattacaggagcctgccaccacacctggctaatttttgtatttttagtaaacatggggtttcacagtgttggccaggctggtctcaaactcatgacttcaggtgatccacctgccttggtctctcaaagtgctagaattacaggtgtgagccactgcgcccagctcgatctagactctctacgcttttggcacccccaaagcccccaccctggtcctgtctacactcatttcctacagactccttggacttcctgctccctccttttcccgggagtctgttccccacacacaaccaaaggcacctgtgaacacctgcatcagatcacatccgcccctgctcagagccctcctgtggctccgtctcaggtccacgaggccccagacgatctgcccctgtcacccctgtgtcctcaccccctccaatcacccccctcgcccactctgctgcagccacactggcctctgcattggactccccacccacttttgcactggcagttccctctgccggggacactgttcccccagggatctgtatgactccctttatccccccctcaggcctttgctcagtgccaccctccctgaccctcttgtttaaaacagctccacctaaccggaggtcatcaggttcggtgaaataagccaggcacagaaagacaaacctcgcatggtctcactcatttgtgggagctaaaaatcaaaacgatgtcatggacacggcgagttagaaggatggtgaccagaggctgggaagggtgctgggaggctgcaggggatgggctttttttgtttttgtttttgttttttgagacggagtcttgctttttcgcccatgctggaatgtaagggtgagataccggctcactgcaaactctgcctcctgggttcaagcaattctcctgcctcagcctcctgagtatctgggattacaggcacccgccaccacacctgactaatttttatatttttagcagagacagggtttcaccatgttggccatgctggtctcgaactcctgatctcaaatgatccgcccgcctcggccttccaaaatgctgggattacaggcgtgagccactgcacccagcctcggttttgttaatgggctaaaaaaaaaagaatgaataagacctactatttgatcacacaacaagatgactattctcaataataattgtacatttttaaataaccaaaagagtgtaattgggttgtaacacaaaggataaatgcttgaggggatggataccccatgcctgtatcaaaatatctcatgtaccccataaatacatacacttactatggacccaacaaaaattaaaacctaaggctgggcactgtggcttatacctgcaaccccagcactttgggaggccgaggtgggaggatcacttgaagtcaggagtttgagaccagcctggccaacatggtgaaactccgtctctagcaaaaatacaattagctgggcgtggtgatgtgcacctgtggtccagctactcaggaggctgaggtgggaaaatcgctggagtccgggaagttgaggctgcaatgagccaagatcgcaccactgcacgccagcctggatgacagagtgatatcctgtctcaaaagtaaaaaaaaaattaaataaattcttaaaaaagtaataattaataataaaataaaacagctttaccctccatacacctcccatctcccttctctgctttatattccttcaagacactgagggctgggagcgatggttcatgcctataatcccagcactttgggaggccaaggtgggcgggtcacctgaggtcaaggagatcaagaccaaccggaggtcatcgggctggccaacatggtgaaaccccgtctctagtaaaaatacaaatttagctgggtgtggtcatgcacacctgtaatcccagctacttgggaagctgaggcaggagaattgcttgaacctgggaggcagaggttgcagtgattcaagatagcaccacctgcactccagcctgggtgacagagcaagattccatctcaaaaaaaaaaaaaaaaagcatttagatcttgtgacccactatatacatacatgtttgattatttttttccttttctcccccaagagaatgtgagctccctggacaacagggtttttttgtttgtttgttttttgccagttctgtcccctgctgttaccttggtcactggtatatagtaggtgctcaataaacatggtttacgtggaagaaagaaggaatgagaaataaaggtaagcttagcacagggcctggcactgagggatgcttatcagtaggaatgacagtgacttaggtgactcagataaaggctcagccctcgggagctccccgtggctgggtgcgcagcagacaggcacgcaggactggttgcaacacctgccctgtgtgacgtgcacaggaagttgcaggttgcagggccagagaccctgaagcttctgagaggcgaagctgagcaaggtctttttttttttttttttttttgagacagggtctcactgtgccgcccaggttggagtgcagtggtgcaatcatggctcactgcagccttggcctccccaggctcaaatgatcctcccacttcagcctcccgagtttctggaactactaggcgtgccaccatacccagctaatttttgtattttttgtagagatggggtcttgttatggtgcccaggctggcctccaactcctggactcaagcaatcagccagccttgaccttccaaagtgttgggattataggcgtgagccaccacgtcccccgccacaaggctttcaaaggccgcacagatgcctacgctgcaggctggggttgggaggtagcgggtggtcccagaaagggaagcagggccacggggagagctcatgggaaggctgggggatccatggggctctggattcattcatcaataagtatttatttattaaactcctttgttgctcaaatcagccagaagtggtttctgttgatggcaactgagaaccatgaaagaaacattgaccccctgtgaagggaaaacctttgaaactgtgttttttctctgctctcacaccacaacggccaggtgcggtggctcacacctgtaatcccagcactttgggaggccgaggcaggcggatcacttgaggccaggagttggagaccagcctggccaacatggtgaaaacccatctcttctaaaaatacaaaaattagccaggtgtggtggcaggtgcctgtaatcccaggtactcgggaggctgaggcaggagaatcccttgaacccgggaggcagaggttgctgtgagccgagatcgcaccactgcactccagcctgggcaacagagcaagactctatctcaaaaaacaaaacaaaacgaaacaccacaacaacaatcatcaacatagactgtgatcaaacgcagggggcgggttcttccacagaccaggcagcagacaccagctgggtgtcctccaactcatttctgacaccatctacccaaagacggcctcagatcccacaggttgagggttcagtcccacacactgctccctccctccccagccgcatgtctgggtctccggaacttctgactggccagcttcaagttagggtttccacgaccccctcttggggttcgatttatttgctagagcggctcacagaactcagggaaacagttacatttgcaggtttatgactaaggatattttaatgaagagatgcatagggtgagcatagcagcttctgtccccatggagttggggcgcaccaccctcccagcacctggatgagttcttcttttattcttattttttgagatggagtgtttcactcttgttgtccaggctagagtgcagtggtgcaattttggctcactgcaacctctgcttcctgggttcaagcgattctcctgcctcagcctcccaagtagctgggatcacaggtacctgccaccacacctggctaatttttgtattttcagtagagacggggtttcaccatgttggctaggctggtcttgaactcctgacctcaggtaatccacccaacttggcctcccaaagtgctgggattataggtgtgaccgactgcacctggcctatttttattttattttttgagacagcgtcttgctctgttgcccaggctggagtgcagtggtgcaattacagctcactgcagcctcaacgtccagggctcaagcaatcctcctgcctcagcctcccaagtaactgggaccacaggtgagttccaccatgcccggttaattttctaaattttttttttttttgtagagacagcggtgtggggcgaggggtaggggacgggtcttgctgtgtttcccaggctggtcttgaactcctgggctcaggtgaccctcctgcctcccaaagtgctgggattccaggcgtgagccaccacgcccggcctgcatcttatatttttattggctaaatttggccatcctaagattgagcaagggggacatggagggagatgagaatagagcatgtggagtgggcaaaaagttgagaaggagactcgcagatcctacaaacacagccaaagagacaaacctcttggaagttttttgcaagggcttctgttatatgggctccctccttggacaggagtccctcctcccagccccttcctccctccagatcttcagtgcttcttttcagcaaattttaaaaatggtaatagttttattttatttcaggtgagaaagcaacacactcattgctaaaaatatataaactcaaaccatgcaaaaaagaataaagcagacacaaacatgatagttatgtgaggtaatgcatatgttaattagctagagttagtcatcccaaaatgtatatatacttcaaacatcgtgttgtacacgttaaatacatacacttttatctgttaatttttaaaaagagggctgaaatcccaccactttgggagaccaaggcaggaggatcgcttgaggccaggagttcaagaccagcataggcaacaaagtgagacactctccccgtccttgctacctagctagctaaataaaaaagaaataataaaataaaataaaaagaatgtaggccaggcgcggtggctcactcctgtaatcccagcactttgggaggctgacaagggcagatcacctgaagttacaagttcgagatcagtctggccaacatggtaaaatcccgtctctactaaaaatacaaaaagaaattagccaggcatggtggtgtgcacctgtaatcccagctgctctggaagctgaggcagaagaatcacttgaacccgggtggtggaggttgcagtgagcctagattgcgccactgcactctagcctgatgagagagagagtccgtctccaaaaaaaaaaaaaaaacacaacatatttatatggccttttgttaaaattgataaaccaatattgatatattattattaactaaaatctaaattttattctactgcattttaaaaacattttaatataactctattgagatataattttttttttttgagacggagtctcgctctgttgcccaggctggagtgcagtggcgagatctcggctcattgcaagctccacctcttgattcatgccattctcctgcctcagcctcctgagtagctgggactacaggcacccgccaccacacccagctaattttttgtatttttagtagagatggggtttcaccgtgctagccaggatggtctcaatctcctcacctcgtgatccgtctgcctcgttctcccaaagtgctgggattataggcgtgagccactgcgcccggccttttttttttttttttttttgagacagggtctcactctgtcacccaggctggagtgcagtggtgtaatctagctcactgcaacctctgcctcccgggttcaagtgattctcctgcctcagtctcccgagtagctgggattacaggagtgtgccaccatgcccagctaattttttttttttttttgagacagagtctcgctctgtttcccaggctggagagcagtggcgcgatctcggctcactgtaacctctgcctcccaggttcaagtgattctcctgcctccgcttccctagtagctgggactacaggtgcccgccaccacgccagactaattttttgtatttttagtagagacggggtttcactgtgttagccaggatggtctcaatctcctgacctcgtgatcagcccgcctcggtctcccaaagtgctgggattacaggcgtgagccactgcgcctggtaaattttttgtatttttagtagagatggggtttcactatgttgaccaggctggtcttgaacttctggcctcaagtgattcacctgcctcagcctcccaaagtgctgggattataggcgtgaccaccacgcccggcttaagcatcagttttgaaatcaagatttcctggttacaagcccagcagagttgcttccaggtggtgggactttgttctactttccactctatttctgtgcctcaatttcctcatctgttaagtggagctaaagatcccactttaaatataaatagtgacaattagataagatcaagtagttaggcagggcatggtggttcatgcctatagcccagcactttgggaggtgaaagtgggaggatcacatgaagccaggagttggagaccagcctggccaacatatcgagaccctgtctctacacaaaatttaaaaatgagctgggtgtggtggcgcatgcctgagtcccagctactcaggaggctgaggcagaagaatcacttgaacccaagaataagaggttatagtgagctttatgatccagccattgtactccagcctgggtgacagagagaccctatttttaaaacaaaacaaaagatatgtaggtaaagtggatttagagaaggtctggcatagagggtagggaaaaacttggaagcaacccaaatgtccaataataggggattcaagtactttttttttttttttttttgagacagggttttgctctgtcacccaggctggagggcagtggccgatctcagctcactgcaacctccacacacaccccctccccaactggctcaagtgatcctcccacctcagcctcccaaagtgctgggctataggcatgaaccaccatgcccagcctgagtgcccagagtagctgggattacaggcatgtgccaccatgcccagctaatttttgtattttagtagagctggggtttcgctatattggccaggctggtcttgaactcctcatctcaaatgatctgcctgccttggcctcccaaagtgctggaattataggcatgaggcactgtgcccggcccaagtacattatgatacatcaataatattacatataaaaagcaatagttataataaacattaaaatagtacttactaatgatgaatatttgcatatatacacctttatctatgtttttttcctaaagaaagcaacactagtctttctttccctttaagatcagttcctagaagtagaattgctgtatcaagaggtagataggaatattaagtctcttaataaatatcaccaaaaagctgcccagatccagtccacagtggggtatgagagtgctgatggcgtgtactctcatcagcactaattatatattataatatattaatatttaaaaacatttttctgagagaccaaaagcaaatctcagtttaatacttatttcattaattgcttgttcaccaattcaatttttttgtattcactgttatttatttatttatttattttaggtcctttgcctgtttttttctgttgtatgtttacctttttctcttattgatctgcagatgttctttacatatgaaagacagaaagcttttcttgccatccatatgtcacaacttatctttttccttgatgtactgaaatgtatcatttttatgaagccaaatcctcttcaccctcctcgcctttttccatccctcaagagtcacctcctcaacatccccactgggaagccttctgtaggaggctctttggagtctgattttcctctcccagggtcctggagtagcagggcctgattgctcaccctgagtaagcccttggggtagatctgtccctgggattgttccaggggtctgactattgatgcaatccccaactaagttacaaggggacttccccaaaaatgagttctagaacctaaggctctgaagtttgtgcagggcgttaaagaggcaaaggctgcacctgcccctcctcccgttactatgacctgaataaggtgttgtcatctcagctcctggtcttggttttttgttttttttttttaatgaagattctgcaagacacacaagcatttcaaaagagtgcaaaaacaagaatgtttcatgctgacaaggattatttttatttatttatttatttatttatttatttatttatttatttttgagacagggtcttgctctgtcaccaggctggagtgcagtggtgcaatctttttttttttttttttttttgagacagagtctcgctctgttaccaggctggagtacagtggcttggtctcggctcactgcaacctctgcctcctgggttcaagcgattcacctgcctcagcctcccaagtagcggggattacaggcacgtgccaccacgcccggctaatttttgtatttttagtagagatggggtttcaccatgttagccaggctggtcttgaactcctgacctcatgatcctcccgcctcggcctcccaaagtgctgggattacaggcgtgagccaccgcgcccagccaagtggtgcaatcttggctcactgcaacctccacctccggattccagcgattctcctgcctcaggctcctaagtagctgggattacagacgcctaccaccacgcctggctcatttttgtatttttagtagagacagggtttcaccaagttggccaggatggtctcgatctcttgaccttgtgatccgcccacctcggcctcccaaagtgctgggattacaggcgtgagccaccacgcctggcccccagtgctgacaaggattctttaaagggcgcattctctctgaaggctggtgggagcgtgagttggatccctacagcacaatttggcaatgtgtgtcccaggccatgaggaggcagcagagggcagtcaatgagaacagtgcccgggagtcaaagctgggtttgccccattggtccttgagtttgagcaagtgaagttacttctctgagcctcagtttcctcctctggaaaagggatgaatattcacagctttagctgttacaattacatggcttagcaccctgcttcctgatgcacagaaatgcttgaaacatgggaactgttactattcttttttttttttttgagagtctcactcactctgtcacccagggtggagtgcagtgatgccacctctgccacctcggctcactgcaacctccgactcccaggttcaagcgattttcctgcctcagcctcctgagtagctgggattacagatgtgcaccaccatgcccggctaattttttgtattcttagtagaaacgggggtttcaccacgttggccaggctggtctcgaaatcctgacctcaagtgatccgcctgcctcggcctaccaaagtgctgagattccaggcggaagccaccacacccggccactgttactattcttaattcttaaagatacaccttctccttgacccagaagtttcatttgtagtaggaacaataattagagacaggcacaaggaaataattagagatggtcacaaatatttagctgcttggattttgcatgacagggagggggattatttataatggcaaggtactacagcatagatgttcaaaaggacagtgattaaacaaattcgagttcattgataggatggcatcttatgcagccattaaaactaatcttcttgaagaatatttaatgacatggaaagacactggtgatatttacaatcttgtggtttaaaagacaacattctaggctgggtgtggtggctcacgcctataattcaaacactttgggaggccaaggcggggcggatcacctgaggtcaggagttcgagaccagcctgaccaacatggagaaaccccgtctcaactgaaaatacaaaattagttgggcgtggtggcacatgcctgtaatctcagctactggggaggctgaggagggagaatcgcttgagcccgggaagcaaaagttgcagtgagctgagatcatgccattgtactccagcgtgggcaatgagagcaaaattccgtctcaaaaaaaaaaaaaaagacacaacattctttacaaacgtatgtttccaattctgtcaaaagaaaaaaggggtcagtcatggtggctcacacctgcaatcccagcactttgggaggctaaggtgagaggattgtttgaggccaggagttcaagaccagcctgggcaacacagcgagaccccgtctctactaaaaattaagaaaattagccaagccaggtgcagtggctcatgcctgtaatccaacactttggaaggccaaggcggacagatcacttgagaccaggagttcgagaccatcctggccaacatggggaagccccgtctctactaaaaatacaaaaattagccgggcatggtggtaggcgcccaggagtcgtttgaactctggaggcggaggttgcagtgagccaagatcatgctactacactccagcctgggtgacaaagtgagattctgtcgaaagaaagaggaaagaaagaaggaaggaaggaaggaaggaaagaaagagaaagaaagaaagaaaaagaaagaaagaaagaaaattagccggtgtggtggcttatgcctatagtcccagctacttgagaggctaggttggaaggatcacttgagcccaggagtttcagactgcaatcccgcctgggcgacagagtaagacccctatctaaaaaaaaaaaaaaaaacaaaaaacaaaacaaacaaaaaaaaaaacgaatgaacaaataaaaagaaaaaagataggtaaacataaagaaaaattaactcatcattcaatcattcattcattgttgccaccgacattagtagaaattaattaaatgcctactatgtggctgttctggggcagaggagaagcaccaaacatttaagagtatctctgaaggggtggaattaccacgcattcaaacagcccttccaccaatgtttactgagcatctacatgccaacagtgctggggcactgggaatgcagcagtgaacaaagacagaaatccatgttgtcatggggctgacattccagcagaggagacaaccaacaagcaataactacaattaggagtgagaaataagaacaaagcagacagagtttggtagtatgtgagagggatgtttgctgctttccttagggtgagcgagggaattagttcacagagaaagtgacatctgtgtaaagccctgaaaaaagggagggagagataaggatacctgggggaagagtatgttccaggcagaggaacaaccagtgcaaagactgtgaggtgagagcgcacctgacaagagttcaggaacagcatgaaggctggagtccagtgaataagatccaggaggagagatgtctggccgggcgcagtggctcacgcctgcaatcccagcactttgggaggccgaggcaggagtatagtttgagcccaggagttcgagaccagcctggccaacacaacaaaactctctctttaaaaataaaagaaaaaggccagcttggtggctcacacgtgtaatcccagcactctgggaggccgaggcggatagatcacctgaggtcaggagttcgacctggccaacatggtgaaacgctgtctctactaaaaatacaaaaaattagctgggtgtggtggtggacgcctgtaattccagctactcaggaggctgaggcaggagaatctcttgaacccgggaggcggaggttgcagtgagctgagatcgcgccattgcactccagcctgggcaacaagagcgaaactctatctcaagacaaataaataagtaaaaataaaatttaaaaaaatttttaaagaagatgtctgctgtttgttttcaatattttgaccaattacttcgtaaaaacttatttaaaaattgaagagcaaacagtctcaggttcccgggctcagacagaccagcgttcaaaactcattaccttctttctatgatgctaagccagctatttcaccctctgaacctctgtttctttatctgtaaaatgggtattaatgatattataccacagggttgtatatgcagcgagaaaatgcaagtaaaacacttatcccggtgcctgcctcctagtaagtgcttaagaactgtttctgcccattaactcattactttctcccagcccctaactccttctgggggggaagttagaaaatcggtatcacacgaaaacagtcatttcccctttaaggacctcagtgggccgggagccagccttcccgcaccttttccaaaatttccaatccccgcttggcattttctgcccgaaggtctccgattggacgctctgtaccaatcggaggctggagcgggccctgagaggcgcccgactccgcccccgcactggccctgcccactgcccggtcagcctcgttgctatggggactggtgggcggtgaggggggaaagccccggatgttcgttggggattcaacatggcggcgggagtgtccgcggtggtggcggtgcaagagagctgagggaggcgcgagggcgcggagttccaggtcgagcagttaggccgcgagcgactgcggcgccgagccggtaggataaggggtccggccaggggcttgcggtgggccgggcgctggcggcgggacggcgtttccgcgaggaggggggcggggccgccggggtcaaaggtcactggtggagggaagggtcgcgtccgaggggtcgggggttaacgcagactggagggagttgtagtggaggtcggagatcaaaccagcgaagggggcgtggcgaaggggagtgcaaagtttgaaattcgaagtgggggcgcgttcgaggggttctgggcgagtctcaaaaaaggcagggtcaaagttaataatttgagggaaggctgcccccacgagggtcagaggtcacagccccaggggcgccaggttggaggtttaaagctgcccctagcggagcagatgaatgagttttaggttcgggggcgtcttttaggggttcaaagctggggcgtgcctagaaggtacaaaggtgagaatctgacagcggggcagctgtttcccagagtcaaaaattaaaacccaaggagggcgtattgcgggggacgggggggggggggggggccgggtcagagatgcttcctggtgacaggagaagggggaaccctcccacaaataataatggcaaacactcatgaaacactatgggctagaccctctttttaacgctttacttgtatgagcttattcagtcctcactatagtcttagggggtcttaacctggtattaagaggttaagtgatttgcacaaggtcacccgatgcataagttgtgcgctgggattctaactccggagttctggcccagagccctgctctggccgaccgcctctcaaatcatcataatgtcggttaatgtttaatgagggctcacactgtgctccacgccctgtgtgcccggtcgtatttcactcctgctgcaatcttgtgaagtgagtgctcaagatgaacctactttacagacgggaaaaatgaggctcagaagcttctgctgaaggcagagttagaatcgaagctgggcctgggtgattccagggctcctgcccctggtcgccacattgtccgctgccagccattaggtctctcctggaagcagggggctgggcagggctgggccactccctgggcggatcggattgtctgcttggtttccttggaagggtgtgatctggcagggaagattcctgtgagcctatgggagtagggtgtttgtaggtggtctggagtccgagcaagggagtccgacgggcttctgactggggagagtgtccctgggtggtaccctgggcagagcggggtgttcactgttcttaaaaccctaagctctcactgtggtccttagtcactcccacctcacttcttatggctctgcccatttctccccagcccctttactgttctccaactccaggcccatgcctcccgcccggtctttgaccttcctgttccttctgctgggaatcctttccccaccctgccctctctcactgacgggtcgctcactctcagctggcccgggaccaccctggctcgccttgctgcaggctctttttctctcatctgaccagcccttacctccctccttaccttaattattagggtgcatggtggaattgctctgtggggttccttgcctcggtccccactgaagccctgcctggcctgcagaggatgtgacattgctgggggttgactgttgggcactgtgccgggtgctgggagtgtggcaggggacgagatccacagagcccctagcctcagagggcactcagttccctggtgggagcagagtggaaccagcccccaagccagtgacacaagactgcgtctctgcaaacggtgatgtggcttgcgagggcatcttcagagagccgggagagtgcccctaccctgggctgaagcctgagtccctttcccctgggaaggctctgaaggatggggaggagggctgggaatgggcttaccaggcaggaggagcagtgtgtgcagaggccctggcatgactggaggtcaggactcgggtgcacagttggggatctgggcaacacgtagcctgtgcaggttcagggcaagacgctgaggggactcagctttggagggacggtgggagcaggggagggctgaggagtacctgtatgtgtggagctgcctgaggccttgatggagcgtgattcagaaagcagtgctgggccagagatgcctggtacacacccctctccatcactcacagagcatgtgaggacctccgtttccacttctgcaagatgggcatagtgttagcgctgcctcatagaattgctgtgaggatgcaggctagagagccttggcccaaggcctggcatacagtagttgctgtgtaagcattagtcttgctgctgctgctgctgccaccccaccactgcctggggagggcctcagagacagtggaggccctcgctccacctgcctcctggctttctctggcagccaccccatccctacctggctctggcagggtcagggagccggcacactgccaggcagccctctgaggctggcccagcctcccagccttgcagtgccagctcactcagcatctcagggtttggcacagataaagaaggatagggtttgggcattggagacccatattcaggtccctcccttgtcacttaccagccatgggacaaatgatttatttgccacttttattccttcaacacgtttggctaggggaaaaagggctttcagtataatgaaacactcatgcatccggccatcgtctggcctgggacagaacacaccgtgatacagttagaggccaagggtctcctcctcaccccccctcctccctcccttccaggggcagcctctgtcctgggtgtggcagtcaccattcctctgcagcctttcatactttgactgcccttgaatgtattcaccaacagtagagcaacagctcttgcccctggctgcacattgcaactccctggagagctttgaaaagatgccttggcccaggcccgccatggaaattctgcttccaacttacttggtctgggctggggctggcctcaggcttttggaagctccctgggcagttcttatggccagcaggggctgacgactgttgtttcacagttcagataaatggtgtcaccataaacatgcctttctgcaagttgctgtttttgttcaacattataggtatatttgagatgggatcttgctatgttgcctagactggactcttaactcctgggctcaagctatcctcccacctcagcctctggagtagctgggattacaggcgcgcacacctgctccccgctttgagctgagcattggagtctggatgtctcttggtggggatgtgtgtaggcctgggacaggccatttgtttttcctgatggtgtttctttttgtgatcgtgtcacacaggagttgcctgttcacctgttgatggccactgaggtggtccgttggagctataaccgtgcagcagtgggccttctggaacgcgtgttcctgtagaccatggccagagtctctctggcatatgcctagtagtggaaaagccggagctccccgctttcctagcggttgccaagtcatgcccccagtggctggaccactgtgctccccagcaggctccggggctccctttatttcaagtcctgctttgggcagctttgtggccctcactgaaacgatttcctcggccgtgacatgggaggtttatgggcccacccacccacccaccaggctgtttggaaacagatggggagatggttcacacaactggcttagctgggacctcgtccccactgactccctacaaccacaggagaagaaaggatggaagggctttcacctttacccccttgggcatccaggacggtgactgcagctttgccccaactgcccttgggggcaggtgccaggggtgacagctgggaaagagaactatactgattcgaacctctcaggagggaggcagggaggacggaggtgaaagttggaggatgggtgaggccttgtaacattctttctgtgtatctgactgttggtcccagtggtaaccaacacagcccagctctacccttgtagattatagtacagtgaaggagacagacctgctgtccccagacggtgacagcccagagaggccagggctgtgaaggagaggcctaggcgagggtcagggcgggatgtgggggggacccaggcagaagggtcagggcgggatgtgggggggacccaggcagaggggtcagggtggggtggtgggacccaggcagatgggtcatggcgggatgggagcggggacccaggcagagggatcagggtgggactgggggggacccaggcagagtggtcagagaaggatggggaaacccaggcagaggggtcagggcgggatggggaaacccaggcagaggggttggggctggatggtggggaggggcacagagagggattgggactgggatggaggcgcagggaccgtaggaagcccgaggaggcatgtggcccagcgtggggagttgaggagggctttctggataagatgacatctgactgatgagaacatatgagcgaggctggaaggaggtggaaagaatgtaacaggtcatgggtacggaagtgccaaggccctgagggtcggaatgacctcggaatggtcgaggatcatcagataggccggtgtaggctatgctgtgcaccctgactgtgtggtagccttgctctgcaaagagcagttaaagaaatacataaaatataaaataaataaataaataaaaaagcaaaaaaaagaagccagtgtggctgagcagggggtggggtcagaggcttggaggcggtgttggatacagcagggcctagcagagccaggtggggtgtgtggattccattctgtgcataatgggaagtcatcagaggctttagtgacatctggttttccccttataaagattgctcaggctgctgtgtgggggacggatcgcggggggtggcgacagggaggctgtggggaggctgctgtgacagtccaagcagaagagggtggagaagacgaggggacagtgatggaggagcgtcctcgtgccagctgaggtcatcagcgctttacccctgttacctcacttcatcttcacagcaacctgtgaagtaggtgctagtatcatcctcactctagagatgagaaaggaggcccagagaggtacgggacttgcttaaggtcacacagcaggcagtggcagaggtaggattgaaccccaggccttggggcttcagtgtcactgattactggggctgccctcccgtggtttggaactggctcggacaagacaggcctgattcctgttcagctggttcttacccaggctcctttgttgacagaagttccgtggagacctgttccccctgggtagtttctgggcgctgggtccctacctccctcagggcctccctttcctttctcatctactcctcgtcccactggctcgtggtgagccagacttcctggccagacaccggtcaggggtgtccccagcagctgtttctcccatcaccgagcccagccccgcacatgctgccagcaggaagcaacctccttccaagtcatggccagggaagtgggacccttcccgcctagtcacccatccggggccaaggcttcttgtctgccagacgccttggcccacaggaaggttggaggggccgaggagggtgagaaggggaacactctcccatcccaggggagccagcgctggcggatgcgacagaagccaccgctcactgaagcctctctcctgggaccctccggtcctgccccgacccttcccaggctgggaggccatctgctgccttcccgaggggcagtggaacttccctgccagggctgctcagtccacacacatcccttagcctttttcactagctgggagcccctggggaagagacaaagaacttccctgggcctctgattcctcacctgttacagggagtattggtggccacctctcagggctgtgggagggcggaagatcatgtgtgtgcgtcgtgcttagcccgatgctcagcactcagtaagtgcttggtaaatgttgaacttggtgcgttcgatggtttccgtcccttgcaccctgtccccctctgggttctcatcccgtagtgagctgtaataaccccagccccccgcccggggtcccagctccacgtgccaggcacgcgtgtgctgtgagtctatgagcatggtcatgtggctgtacccagagaccctgaggaggaggtgtttttaacctcgtttctcttttcccgtgtttcaattttcagaaagcacgtttttcctccatgtgcatgcattacctattcccctaaataatcactgaaaaactgcacacagcacaaaaggatgtacagggacgagcaaatctctttcccacccgcctgccaggcccttcccagagatagcatcatcacccccggtttcttttctttctttcttgaaatatttgttcccccaagtgcccgcccctcccttttgtttttactcaaatggagcggacttcccatgtttatattctgtcctgtgctttgcgtttcccactccgaagctcgctgtcaggacacagagtgccgcctcgtgtcccacgcacacgcgtgcccccacggacagcacagccattctgtgctgatggccatcaggccattcccatctttccgtgctgtgaacagggctgcgcccgcctgagtgtggctgtgcatatgtctctaggtgtgagtctgagcttgtggcctcgtggtctgagacaggtgccccgttaactttgccggtagtgttagtgtttcaccctgctggggaggttgtctggctcacactcccaccccccagtgtctgatgacaccggggtttcctcactcccttgctggaatagacgggtgtcacctgacattctcacctttgccagtcagataggtgacaaacagtctcatcatggttctgattttaatcagagcaaagtgggacagctttgtgttgttgaaagccatcttgagcttccttttcttggagctgtctattcctgataattttactttctctgagaaggggaaactgaggcacaggccagcagtcccacagcaaatacgtggcagatgtggcactcaaaccttggctccgttctggagctcctaacccatctgacacagaagaggtcaagggcttggcctccggagccagctttgtctcttactagcagtgtgaccccagacaagtcacatcacctctctgtgcccgggtgtcctcatctgtaaaatgagggtgctaatgatatctactcttagagttgttttgaggatctaaatgtatattcggcaggcaaaatgtatagtaagtgctcaaagactgttagctgcgttactaatagccgtattattaatattatagctatgtcaccaatagccatgttattaatatgagcaggcactgtttgagtgctttctgtgaactaacctactggaccctcccatcaactccaagacacacgtgttcttaggatctcccttttctagggaggagactgagagcctgggggacctggccccgtcacagagcaagaggaactgggatttggatgctggaggcctggctggtaatcgctgtggccgcttcccctgctacccggggctaagcctgagggttacaaagctctccctcctgcttcccccacccaccttctgctgtctgcattccaggcaggctgcccaggagctttcgagcagacaccttgagggttgggagcaccgggtgggcagggtcctcacctagagagctccccgtcccagaccctccctgctcctgccacctgtcctgggaactcctgataaagcagcattgtgcagcggttttgagttcacttcccagcccggttttgccactcccacacttcactcccagaggcggaaggcggccggtcttcctgggctgcgtggggtgccagcccccctccccttcccttccctccctcactgcgcccacagtcaccggtcagcactggccatggggagaaagtaggaccctgcgggccactggcccctccacagacccgtccccaggtgaagacccctccctgccctccccacaggaggcccctgtccttctctcccgaggaaccctccttccctgccgcccacaggggcctccatagttctgtcgtcccttccccgcaaatcttccactgcagcctgggcccacgttatttgactctcaaatgctatatatatacacagcgcttctaactccactgcttttaaaaaacctttaataattgtcaattataatatgcccatagaaaagtgcataaaatgcacaggtaagtttagcaaagaattacaaagtgaacaacgcttccccaccacctcggtaaagacagaacacaacctcccaaaagccgcctgcccataacccctgtccatcacgaccacagtcgtgagtgctctcctgaccttggtggtcactgtgtccttgcttttcctgatagtttttaccatgaggtatgcatccttgaattacagaatgtcatcttgcctgcttttgaacttgacataaatggaatcttccagtatgtccttgtctgtgctttctttcgcccttaggcctgtgagatccatctgtgtgctgagtgtatctgtagtcattcatctttgttgctgtataatattctttttttttctttgacacagagtctcgctctgtcacccaggctggagtgcagtggtgcaatcttggctcactgcagcctctgcctcctgggttcaagcgattcacctgcctcagcctcccgagtaactgggattacaggcatacaccgctatgcctggctaatttttttttttaatttttagtagagagggggtttcaccacgttggccaggcgagtcttgaactcttgacctcaggtgatccacccacctcagcttcccaaagtgccggcattacaggcgtgagccactgtgcccagccccatataatattctgttcctccatctcctgctgcgctgatgcgagccatctctttgtagcatctcctggggtgccggtgcctgcgtttcttcagggaatatacccaggagtgcgtagcccagggcagagggtggggtagcttcagatttagtgggcgctgccacacagcctcccaaggtggtcaaatctgtgtatcctcctagcggtggtgactgaggatcttagttgctccacctcctcaccaacatttggtaccgtcagactttttggttgaccttggaacatttttattcttttttcctgcaaaagtaacaccactggttatcatcgggctgagcccctcatgttattttgtcctccccttgctcctgtccattccgactctcacccattctgtggacaggagtcaagtgcttattctttttttttttttttttttttttttttttgagatggagccttgctctgtcaccagggctggagtgcagcagcgcgatctcagctcactgcaacctccgcttcccagatccaagccattctcctccctcaccccctcaagtagctgggattacaggcatgtgccaccacgcacggctaattttgtatttttagtagagacagggttttaccatgttggccaggcaggtctcaaactcctgacttcaagggatccacctgcctcagcctcccaaggtgctgggattacagacgtgagccactgcgccctgcccaagcgtgtattctttgaccagctttgcgctggggcccagcgactgaagggtgaacccaaacaacaggcagccctccccgagctcagtccagtgggaacacagacctcgactgcagagcaacagaaagataagccgggctggaggctcccggcccccatcttcccacagtgaccccattttgggaacaggaacccccatccctcgtcttgtttcgggattaggcttctccaaatctggcaccctatcaccttgactcctctcttgcccccccgccacatccaaagtgtctggaaagcctgtcactctacatgacaatgtaacctggtgctgcgggctcctcttccttgtcactccccttcctcgtcatcccccttcttcgtcaccccccttcctcgccacccccttcctggtcacacctcttcctcgtcacccttcttccttgtcacccctcttcctcgtcaccccccttcctcatcatcccccttcctcgttaccccccttccttgttacccttcttcctcgtggccccctagttcaagccaccctcatctccctcctggaccattgaggcgtgctccctgctcccttctcccccactgtccccacagttgtccgcacacagccagaggtagccgtgcacacctggtcagggcaggaaccctcccctggctccacctctcccagcagagaagcttgcaaggtcccaggcaacctggccactttcctgcctgccctgcttccctcttctcctgccaccattcctggaacattccaggcaggtcctaccccggggcctttgttcttgctgccccctgggcaggcagcaccctccttccttctgttcagtcagcctctgctgacagtggcccccttggggagatgtttcttcccgaccatgggtccccaggagcagcccctgtcaccctccctctagcaccttcccccggtaaccctcatgatggttacttccattatgacatgtgggtctgttggtttattttgtctcccggcataacgtagcctcagggcatgggggtaggggtagaaccacagggccttgccctgccccttgctatgttctcagggattggagtgtggtagtctctcagtaaatgctggttgactgactgactgactgactgactgaactgtagtaagctgggctgccagagcgtctaatggggacccgccctgggtggggcacaccgggaaggttttcctgaggaggaaatgccacttgaaggatgaacttggcctcgactaagggaggaggctgaggcagctgccattgcagaggtctcccggcgggggagtgcagggggcctttgaggaattgaaggaagacaggtaggtcggttcttgggttggtctggattccagtcttgacagctgcttgggcctctctctgcctcagtgtcttcctctctagaaggtggctgcttcaggtgttcctggacattcctgaagttctgctcctaacacacttatcctggtgcctgatacataaatataaatgtgattgtttatttttttccaacaaatttggtggagtgctgacccgtgtggcctccagggatgcggtggtggataaacagacccggttgccgcccatttggagcctggcctctggagccatctggggcacccctgcttggaggcaggagaaggcctggtgtgaccttgggcccggggagtccttattctagatccgggaagctcttcagggtgatgaataggaaagacgaatggagggtttgtgcgtgccggccctgtgtcccggccagtgctcccaagctgctgcctgggcctccctgaaatcccaggaggtagctgcacccgtgtgacccatttcacagattgggaggtgaggggggcaccaatgctaagtccttcgcccattttgcaaactagagtagatctggtggtgtttcctctgtggtctgatgtgtttttctggtagccagtcaggtggggcagctttcaatttgttcttccagactcctgtgaaggaagggccagttcaggtcactttcctttttttttttttttgagacagagtctcactctgtcacccaggctggagtgcagtggcacgatcttggctcactacaacctccgcctgccgggttcaagcgattctcctgcctcagcctccggagtagctgggactacagtcgtgcgccaccatgcctggctaattttttgtgtttttaatagagatgaggctttgccgtgttagccaggatggtctcgatctcctgaccttgtgatccgcccaccttggcctcccaaagtgctgggattacaggcgggagccactgtgcctagtgtcttagccattcctgaggttttttttttttttttgagacagggtcttgctctgtcacccaagctggagtgcagtggttcaagattggctcactgcagcctccacctcctgggttcaagcaattctctttcctcagcctcagtagctgggactgcaggtacacgccaccaccctgggctaatgggctaattttttttatttttagtagaggtggggtttcactatgttggccatcctgttctcaaacttttttttgttgttgtatttttatagagatgggatttcaccatgttgcccaggctagtctcaaactcctgagctcaagccagctgcccgcctcagccttccaaagtgctgggattacaggcatgagccactgtaatgggcatccagcccattcttgactttttgtaattccctttaaatattagacaagcatgttgtcagtgtatgtacgtgtgctcgtgcgcacacacctgacactgagtctcccaatccatgaacgtggtatgtctctccatttgtttatgtcttctcgttcatacttttccagccgacgccttgcccacctcttgtggggtttttcccagggtagttcatgatgtggcagggagtctgtgccctccactcccacaagatgccgtgcaccctgggtttagccttgctggctgaggacctcatggcggtggcaggaggccacttctcccattctctgcttcttccctggtaccgcccctggaccctggcggagggcgggcagggtgcccagaaaggaggctgtaattttcctgaatgatttcaagggctaattaaaggtttgccttgactaatcagcttacggtttaattattagggaacaggctctgggatgcgggaagcagctcagctggggtctccccacagcgtggcaggaaggagccaggacccagccctactctggggggctggcaggatatggggataccccagcaccctccagtgggtcagtggggggttctccatcccccactgagctgtgacaggtggagggcagcaggtgtgatggagattacagccgattcctcccctgattcacatcatcccccacagcccatggctggctggggaggggctggccctgtccctccagcagctttggcagggcccgtccctccccactttcctgcagcaccccagcctcgctggcctttgtggagtgctcggacttcatttattctgtgggtcttggcttaaaggtcagcacctctgggaagcctcctcgggcctccctcctgtcagagctggtgatcagccgcacggccccttgccagttcttgggatcatggttgttcatctgctgcaactcctgcagacactgagaagtacactgagggggatgcctgagctgggccagtgtcggggtacccagcgggataaagggttcgggacctgggctccaaggagggggctgggaaggggtgttcagggaggactgagtgatggcttggaggcggctggaccaggaacacctcatgggagtttgcgaatggggaggggactctggagatggctgtgccaggcctgacttcattccttgcattcctcagcaggccccagactcctgatggtcctaagtgggggaaggtgagccagagagggccttctgggtactgccctccccccactccatcagtctgtctcagtctctctttacaccctcccccatccaggtctcagggctggatccatcctcctgcccactccccaatctccttatcctttggctgcgccttagggtcacccggggtgggaggcactgcaggggcccaagctggaccatttgaagctgactgtacagctgtggggtctgggccttggggttttttaatgctcccctggcgactctgacatgcttctgagctggagtgagggctgctggcctgcaggaatggcaacaaatgtgttttagcttttggcatgttctgggtgcttttctaggcttctgacatggaggggttaagtcacggcacgctacggggacatgtgactgtgattcctgtgttccagataaggcaactgaggcccagagaaggcctcgagcttggcgatggcagtctctgtcactgtcttatcttcccatttctggtctgtccagatgtctgtctgggccttctctgtttcacctctgtctctctccctgtttttctgcctcttatctcccttccccaccccaccctcctgcatttcagcttccctcctcccctggcagaaacttcccagatttctgtgttttgaggcaggatctggctgaagccacagaggggagatgggttctgcaggcccaggacatccttctgaggggaaggatgctgatgtcaccacgctggcctccctaacagctcctgacacgtggagtctggggctgggggcaacacaccatctgactgacagtccaagggtggctagggctggctctgcaagtttgcagggaggactgtccccacgggttgactctgacatgccctgtgacaccagccacctctacggtcccgggagtcctctactgccagttaatgtttcagcttttgtgggtaggactgcctgtcggtcagtagtttaattgcaacaaaggtttgtgctagaaaggcgaatattacattgcaagagcctttattatttgatgggactaggggggactgatagctgatggtcccgtatgtccccactcactgagggatgagggctccccttgcctcctctccccctacccctctccagcgaagggctcaggagtccagctccacctgcagcctctccctgctccggcacagcatcctctgaccttgggcgaggccctgagcctcagatgtttttgagttcccacatctggagcaggaggataatgattcctgctgcctcccagggttgctgggaggatgaagtgagtctgctgtgtgatgctcagaacagggccactgtcattatgccattctggttactagtactcttattaccattacacttattagagaggcaggatccgtgcttggatttagtagttaggattcacagggtgagtgatccataattctttgccattacgatgaggtcacatttcctttggtaaaatgttgaacacctttgtattatggaaatgttcacacatacccagaagaatagtctcgcgccctcctggggtccctgtcagcagctcagcaggtagcagctgtggccaggccttgtcgcctgtgcctgctcctcacctccctgcttatttcagagcaaatcccaaacgtcgtacagccagaaatattccacacttttccagaacaagcctgcctcagtctcctcatgcttccccagttgtcttataatcctttttttttttttgagacagagtctcactctgtcacccaggctggagtgcagtggtgcgatcttggctcactgcaacctccgcctcctgggttcaagtgattctcctgcctcagcctcccgagtagctgggactacaggcgtgtgccatgatgcccggctaatttttgtatttttagtagagatggagtctcaccatattgatcaggctggtcttgaagtcctgacctcaagtgatataaccatctcagcctcccaaagtgctggaattataggcgtgagccaccgtaccctgccataatcctttttcatttgttttttgttgttgttgtttgagacagagtctcactctgtctcccaggctggagtgcggtggcacgatctcggctcactgcaacctccgcctcccaggttcaagcacttctccctgcctcagcctcccgagtagctgggattacaggcgcccgccaccacgcctggctaagttttgtattttttagtagagacagagtttcctaggctggtctcgaactcctgacctcaagtgatccacccgcctcggcctcccaaaatgttgggattataggcgtgagccacggcgcccggcccatttgtttgatttgggtctggacaaggtctacactttgcatccggttgataggcctcttttttttgttttgttttgttccctttgttacccaggctgaagtgcagtggagcgatcagagctcacgtgcagccttgacctcccctgctcaagcaatcctcccgcctcagtctcctgaatagctgggaccacaggtgtgcgccgtcatgctcagatactggcatcagctctttggcgtgcatgttgtcgtagtttttctacaggcgacctaggccatttgtcctggagttttgcagtctggggccagctgatacatccttgtggtgtcattgcacgtgttctctgtctctgtgcttcctgtaagttaggacttaggtctagaagctcgatctgatgcaggttcagtttcttctggcaagcacgctttcttaggtggttgcttggatgagcatcagaattacttacatgtctgtatgactgtcaagttcagttttcaagtaaaaattaagttttttttaaaaaagcgagtgggttgagaagaacactctgaagtcactcctagtaaggctggtacccagatccagcagaagtagggtgggagggaccaaaggactgaggctcgggtccccccttccccaccccccggggcctgggagcaataggctgggtgccccggcttcaagtaaaccagtggcattaacatgtgggcctctggttcctgctttgctagggccacaggcttccagctgagagctgctgccacccaccctggcaaccccttccgcatcgcgtggtggtgacaccttcagaacagagtggtctcccaccccagctctacccttggctgcctgtgtcaccctgggtggctttcccagcctctctacctgcttccttcttgacagcctgatggtggccatacgtcccttgggctgtggtgactgggcctctgggagctgcccttccacttctgcattttaacataaacctccttgacctcagctgctccattctctgctcccttccagccactcggattccagtcctgggggcctcctcactgaccatgccctccaccctcagtgctgttccctggtactctgcatggcttcctcacctgtatcccgtctttgctcagacgccacccctttagagacctccctgactgtgccctctgaaagagcaccttgtcactctctgtcccttctcccacttgtttacttgtatattgtgttcccactagaatgtcaactccaggagagcagagactcttgtcttattcactgctgtgtccctggtgcctagaacagtgcctggcacctgctaagtgcatattaaggagtcgttgctcactgggtagaagcattaaaaaaaaaaaaaaaaaaaggctgggtgtggtggctcacgcctgtaatcccagcactttgggaggcaaaggtgggtggatcacctgaggtcaggagttcgagacgagcctggccaacacagtgaaaccccgtctctactaaaaatacaaaaaaattagcttggcgaggtggcaggtgcctgtaatcccagctacttgggaggctgaggcaggagaatcgctggaacccaggaggcggaggttgcagtgagccaagatcacaccaatgcactccagcctgggtgacagagcaagactctgtctcaaaaaaaaaaaaaaaaaaaaaaaaaaaaaaagaattgttgagtgcatgaatgaataaaagaaagaaaatgactgggcacagtggctcacatcccagcactctgggaggctgaggtgggcagatcacttgagcccaggagtttgagaccagcctgggctatagtgagacctctgctctacaaaacatttttaaaattattgttttaaaataatttaaaaattatttaaaatgtaaaagggcgtggtggcatgtgcctgtggtcctagctactcaggaggctgaggtgggaggattgcttgagcccaggagttggaggctgcagtgagctatgatggggtcctagctactcaggaggctgaggtgggaggattgcttgagcccaggagttggaggctgcagtgagctctgattgcaccactacactccagcctgggtgacagagcaaaacctatgatgatagatagatagatagataagatagagcgagcaagaccctatctcaggtagatagatagatagatagatagacagacagacagacagacagacagatagatagatagatagattagattagatagatagatagatagatagatagatatggttaagtgagtggactttggtcctggtcagacttgccacggaatcccagttctgatacactcgccgtgtgactgagggctgacatgtcttctctctgagcttcactctcctgcttcacacaccgtgtgaacggcaccctcctcgctgccttcttttgcaccaggatggagcctgcacgtaacactttgtagtggtctcactgctgtcctgtctccagcacggggcaccgatgagccagccagaagccgtccctgccggggggatgcttgacccaaatcttcagtaataactccttccactctgggtgaccagctgtggtgccccagggcagggacttgttgatctgggtttgttctggaggccagaagggtttcctggggactgggattggagcaggattgagagtgcctggtatgtggagagacctggctgttgtggcatgagtccgagggctcaggggccggctgcttcccggcctttgtcttccttgcaggaaacaggccaggagttacaaggggccagaggatgctgctgtggttatggtggaagttaacagctttgggaagtgtgcatgtgtgtgagtgtgtgtgtgtgtgcacttgtgctcattgtaaagagagacggtaaagaaatgaggagagactgcaggcacatgcaaatacagagaaagctttcagttgtcaggatcgctctcccggtttttcctgcatggtggtgtaaaatctgacatgtgtacagaaaagtgtgtaaaacctccatgttcagtttaatgaataattataaagcaaacagccatgaaactaccacccagatcaagaagacaggcatcaccagctccctgaaagccctctccttcacctgcccttcccagtgctaacaaaaacattctcctccctttcttttcattgttcctcttttttggtgaattgtgaaagatttcagacacccccaagagaagagagaatcacctgctgaccaccctcaggcccgctgcccagctaaaagacgaaatgcttgctgtgggtgcagcccccaggtgcctcccccagggccccaggcgtcgctggccctgcgtctgcttccctaaacagtgtcccgcattgttctgcaggattttaaactgcgtgtaaatggtacgaggccagcggcacttggctgcaactctctcaatattttgttcttgagatttctctgggtggagtaatgaagctctgtgccagaaggaatggttcccagcgggggtcagggcacccctacccctggccagaggaaagcagctctgtcctgggggggccccaggaggacgctctgggctcctctcacccaggcccgcagccccctgctccacgtgggtttgaggcggccacctccagtggaagtggtagagcgccgttggcttcctagggcaccacataggacccagttacagccgtgatgtgaaggggccctccctgagcttatgtaaggtgtaatggggcgctggtgccgcctggggcctgtgtgcaccacggaggggccttctctggaggagggcatagatcagcagctggggcaggagggcctcttctcttcccatactgccctccccctgcgcccgcccactgcccaccctcacccgccctgtttgccaggctcacacagcctttcttggagaggccctctggcggggagtttactctcaaaggctctatatctagctgacctgggattgccacccagctccgccaccttctagctggacggccctgggcatgtgttgacccctgccccacctctgttggcctcagtttccccatttgtaaaatggaattgtgtgagggttatttcatccatgcaaagccttcgtagaagctagtgtgtggaagcctcttaatgagccttagctgttagtatctttgtcatgcttgccattcattcactcatttttgttgatagtaactttttgcctcctctgagtccagccctgtcaggctgaggtcctgccttcatggagcttataatacagtgagggagacagacatggtactaggcagtgacaaaccagagtgaccttggaaagcacaggccagagtgtgacagctgtgatgggagaagacccagaggactgtgggaggccctggctccagcctaggaaatcaaggaaggcctcctggaggaggagacttcagagctgaggcctgaaagaggagcagggttagtttgcggaacattgtcccaaggagagcaaatagcatgttcaaaggctaaaagttgggaaagggtctggcattttaaataaaccattactatttttaagaaaactttaaattctgagatcattgtagattctcctacagttgtaagaagtaactcagaatggccaggcgcagtggctcacgcctgtaattccaccccatttggggaggccaaggcaggaggatcgtttgtgcctaggagttcgagatcagcctgggcaacctggggagacaccatctcttcacaaaatagaaaagcttatctggctgtgatgctgtgcacctggagtcccagctacttgggaggccgaggtggatcacttgagcctgggaggttgaagctgctgtgagctgttaatggcaccactgcactccagcctgggcaacagaattaaggctctgttgcaaaagaaagagagaaagagagagagggagaaagggagagagggagggagggagaggggggaaggaaggaaggagagaaggagagagggagaaaagaaaagaaaagaaagaaataatacagagaggaggtctggcgcacctttacccagttttccccaatggtaacacctgcgagactgtagtaccagataccagagtgtcaactgacattgacactgtcattgtcaattgacaattgtcattgtcaattgtcaatgacaatgtcattgacattgacattgtcagtcacaaggatccctcctaataccttctcatagctacacccttcccctgcccatccctaacctctggcaaccactcatctgtctattcccccattgttaggattttgtcaattcaagaatgttatgtaaatggagccacccagtatgcaccctttttgcattgactttatcccctcagcatgattctctggaggtgcatccgcattgtggtgctgatagtgactactgagtagtattccgtggtctggatgccccaccgtttgtttaaccatttcccgttggaggacatctgggtttttctaattttttggctattacagacaaagccactataaacctcgacaaagagggtttcgtgtgaatgtcagtttttgtttctctggggccaatacccagaggtacaattgctgggcagcgtgctggttgcatgttttaagaaaaccatcaaaaccattttctagagtggctgtaccatgttatattatcaccagcagcaggttccccacatcctcaccagcatttggtgttgtcactattttttattttagctcttctaataagtgtgcagtgataactcattgtggctttaatttgcatttctctaatggtaatgatgttgattagcttttcacgtgcttatctgccatctgtgtatcctcttcagtcaaaggtctcttcatgtcttctgctcattttcttattggattgtttgttttcgggttttttttttttttttttttttttgctgttgagttttgagttttcactgttgttctttttttttttcttagccccaccaggttctcatatgagatctttatctattctctctcttttttttttttttttagatggagtctcactctgtcgcccaggctggagtacagtggtgtgatctcggttcactgtggcctccgcctcccgggttcgagcgatttttctgcctcagcctcccgagtagctgggattacaggcatgtgccaccacgtccagctaatttttgtatgtttagtagagacggggtttcaccatgttggccaggctggtctcgaactcctgacctcaggtgatccgcctgcctcggcctcccaaagtgctgggattacaggcgtgagccaccgtgcctggcgagatctttattctacatactagtcttttgtcagatacgtggtttgcaaatattctctcccagtttgtagcatgtcttttaatacttttcatacggacttttgcagagcaaaagtttttaattttgtattaatttttttcttttatggattgtgcatttgctgtcaagtctcagaaccctgtgccctgtcttaggtaccaaataagtttcttctgctttttttttttttttttttttgagagagagtctcgctctgttgcccaggctggagtgggctcactgcagcctctgcctcctgggttcaagtgatgcttctgcttcagcctcccaagtagctgggactagggaggcgcccaccaccatgcctggctaatttttgtgtttttagtaggcacaggatttcaccatattggccaagctggtcttgaactcctgacctcgtgatccgcctgcctcagcctcccaaagtgctgggattacaggcgtgagccaccacaccctgcctgctttttttttttccataaaagtttgatagttttacatttaagtctgtgatccattatgagttaatttttgtacaaagtataagttttggattaaacttctttttttcccccgtttggcatgtggatgtccagttgttccagccagcatttgttgaaaatgctgtctttcctctgttgaattgcttaggcttctttcacaagaatcagttaccacgatgagatactacatcacacctactaggatggctgctgtcaaaaaaacaaaaataacaagtgttgggaggatgtggggaaattggagccccgtgcattgcttgtgagaatgtaaaatggtgctgtcgctgttcggcatagaattaccttgtgacccagcaattccgctcccaactgttcgtccaaaagaattgaaagcagggactcgaacagatatttgtacacccaggctcatcacagcattattcacaagagctaaaaggtggaaacagctccgtgtccatcagtggatgaatggaggaacaaaagatggtatacatgatggaatattattcagccataaaaaggaatggaattttgggtagaaagctatcatgtggatggtcttgaaaacattatgcttagtgaaatcagccagacacagaaggagaaatcctctatgattccacttgtacgaaggacctagagtaggcaaatacaaagagacagaaagcatgcatggagtcccagctattcgggggcaggaggatcacctgagcctaagaggttgagttcagcctggacaacatagtgagacccggtctcttttaaaatatatgtatataggccaggcgcggtggctcacgcctgtaatcccagcactttgggaggccgaggctggcagatcaagaggtcaggagatcgagaccatcctggctaacacgatgaaaccctgtctctactaaaaatataaaaaattagctgggcgtggtggtgggcgcctgtagtcccagctacatggaaggctgaggcatgagaatggctagaacccgggaggcggaggttgcagtgagctgagattgcaccattgcactccagcccaggcaacagagagagactctgtctctaaataaataaataataaaatatatgtttatgtatatatagagagaaagaaagtagaacagaggttatcagggtttgaggggaacaaggagctgttgtttattgggtacatagtttttgttggaatgataaacatgtttgaatatagatggtggtgatggttatacaacattgtggatatatttaatgccactgaattgtatacttacagatggttaacaatgataaatatgctgtatattttaccataataaaaataaatttttgaaaccagctaggtatgttggtgtagatctgtttctgagttctctgtcctgttccgctgctctgttgctgtgactgtcccaccccatctgggttacttgctgcagcgctgggagagggattcctctggcttcctctctcttttctctttttcaagattgagctcttgaaaaaagagctctgggagctggcattttggagctcctctagggttccgcgtgtagaagatggcactgtgttgggcctaggttcagagtcgtccttgacaccacctcatcctcagcccgtgtctgactcatcagcgagcattgccttttcttggtagacatagcccaggtctgtccccctctctccactgccactgtcctggctgcctcacagttgcccaaacagcgctgcctccttgtcactcatcctcacgcccactcaggccccttgattccgtccttcacagggcaaccaaagttacatctgtaaaacccaggcctggaccaggtggagtggctcccacctgtaatcccagcacttggggaggccgaggtgggcagatggcttgagctcaggagttcaagaccagcctggacaacgtagtgagaccttgtctctaaaaaaaataaattaataaaaattaaaaaaatgtaaaaacccaggcctgtccttggcacccacgttgtctccccttgctctctcatgatctgcctccaccacaccgtccccgttcaggcctgctgcccacccatccctccagccagtgtgtgtccgctggactttcacattttttgcgtgtggtgcttgactataagcctgatggggtagggcccacactgcacttctgcccccgcacaggcggcacgtgacagacgtgcattagatttctgtcggtggacgccatgaacgtgggaaggaggctgcctgtggccggagcaggtggttgggggcggagagtgtgcaaaaatgaggacagagaggtgggcgcgacctcggtgaggagacggctttagctctgtgggcctgagtaggtttttagcaggagaggatacaatcagattagatttacaaaggtctccctgacctagcagaaaaaggcaaaggctttgaatagacacttagcggaagaggacattctgatggcttttataaatatgaaaaatgctcaaccctactaaatagaaaaatacaaatgaaaactaggctgaggggggccacacctcacatatcagcagagatcagagagactggccacgccccgtgctgcaaggccgaggggagataggccctggcaccgccgaggggctgtgagtggggacaggcctcacgcagggccacttggcagtggtgaacttcactggacatttacccacagacaaacttgcacacctgtgaaatgacagctgcacacagtgagtgttgccgcaccatttataagagcaaaagacaggaaaccaccactctggcccgatggggactggctccagacatcacggtccttccacacagctgccaaagcagcaaggcagtgctctgccaagatcaaggcagggaaagatcaccaagacccacatatatatgcagcatgtctgtggtttcagttacctgtgaccaaccatggcccaaaagtacatggaaaattccagaaataaccaattcatatgttttatttatttatttttttgagatggactctctgtcacccaggctggagtgcagtggcaccatctcagttcactgcaacctccgcttcctggtttcaagcgattctcccacctcagcctcccaagtagctgggattacaggcatgcgccaccacgcgcagctaatttttgtatttttagtagagacaaggtttcaccatgttggccaggctggtctcaaactcctgacctcaaggaatccacccaaagtgctgggattacaggcatgagccactgcgccggcccaacagctcatacattttaaattgtgcaccattctgagttatcgtgattttttttttttttgtagagacgaggtctccctatattgctcagctggtctcgaactcctgggctcaaatgatcctcctgcttcagcctcccaaagtgctgagattacaggcaggagccactgcacagcctcgtgatgaaatcttgagccatcccactctgtcccgcccgggacgtgaatcacctttcttaccccacatatccatggtgtatgtgctacccatctgtggctactcagtagctttctcggttctcacatccactgttgccgtatcacagtgcttatgttcaggtagcctttatttcacttaacattgtccccaaagtgcaagagtagcgatgctggcaatttggatatgccaaagagaagctgtaaagtgcttcctttaagtgaaaaaggggaaagtattgaacctaataaggaaaagaaaaaaaattgtatgctaaggttactaagctttacagtaagaacgaaccttctatccatgaaattgcgaagaagggaaagaatttgtgctgggtttactgtcacacctcaaactgcgaaagtcaacagccacagggcataagggcttggttaagatgaaaaaggcattacgtttgggggggtggaagacaggaacagaaacgtgttccaactgatggcaatcgggttcaatgttatccacagtttcaggcatcccattgggggtcttggaacatacgccttgcagataaggggaactgctgtatatatagttggccctgggtatcatgggccctcaggatcacgggttctgcacccacccattcaaccaacgaaggactgaaaatttactatggagggccagcttttccatccgcggttatggagggctgactgagggacgtgagcatccctggatgtggtacctcctgcgggggttctggagccaatctccctcagctaccgagggagaattgtatagatatatcaatttttttctttcaaatcataattataaattgttaggatacacagtgaaaattgcataaaacataaatgtatagcaaaaccaattactataaagggaaaaatctatgtagccacccctccaggtgaagaaacagatggtgccagcctcccccaacccccaaaagctcccagtccctcccttcccccagaagcatccactctttttaattttaattttttttgagacagagtcccactccatcacccaggctgaagtgcagtggcacaatctcagcttactgcaacctccaccttctgggttcaagcaattctcgtacctcagcctcccgagtagctggaattacaggcatgtgccaccacacccggctaatttttgtgttttgttgttgttgttttatttttttgaaacagagtctcactctgtcacccaggctggagtgcagcggcaccatctcggctcactgcaaccttcgcctcccaggttcaagtgattctcctgcctcagcctcccgagtagctgggattacaggcgcctaccgccacgccacgccaatttttatatttttagtagagacggagcttcaccatgttggtcaggctggtcttgatctcctgacctcaggcgatccactcgccttggcctctcaaagtgcagggattacaggtgtgaaccaccccacctggccttaattttaattctctaaaaatgtagagatggggtttcacaatgttggccaggctggtctcgaactcctggcctcaagtaatcctcccgcctcggcatcccaaagtgctgggattacaggcatgagccaccgtgcccagtccaactctcctgacttttgaggccatcatatgcttgcttttctctctgtttgccacctctgtatgcagcctgaagcagtttccttttgcctggctttgaaccttaaagtccgaggatggagtattgttcgatgtttttgcctcttctgtgtggcgtcttctttgatgctcatccacatgtagctgtagtcattcattcattcattctccctatcatgtgcggtgccatggagccttcattcaccacctcctggggacgagcatttgtcttgtttctagtctcttctcgcgtgtgctccctgccccatgggcctgcgttatgctggagtgtgtacccaggagagctcttgctaggtcaagcgtgtgtccccacttccactcgatgctgctaagctcctgccaaatgccagcagcgtgggagagccacggaatgttttcgagaagagcaaagtacagaatattgtgtgtcatgtggctgccatttctcttgtttttttaaaaagcaggtaatcatgtgtgtacccatacacacacgtaggatctctcagaaaggaaaagaaaaaacctgaaagtctagtagcggttgcctccagggctgagctgggccagggtggaaggaggacatcctgtcacagtttaccctttggtgccttttgtcttttgaaccgtgtgcctgtattacaaagacagagagaaggaaaagaaggaaaaggggtagatgagtgtaaatgtggtaaagtgagaatcactgagaatcgcccagtgcagctccctctccgtccattggggacctcgtttcctgtggctgtccagagctgtccaatccccatccactccccgccagagcccaaacctgcccgtctggtttgcagagctgccccacgtggctcctctgcgggtggttactcgacaaatgccccaccccccaccccatggggaggcagtggcctgagatctgggacttctggatctaggcccctagacctgccctgctgtggtccagagcctggcccagcccctccttggacttcctcctcactgtgacagggggtggacagaggtggggatgggagttccaggccctgagagcaagcgctggcctcccagcccacgttctgtgtgtggagataacatctgcccttgaggagttggctgcaggggcaggggtgtgccagagcagggtagtgggaaggacccaggtgcgtctgtctgctgtgtgccggggcgcttgctcactgttgtccctggattcaccatggcctgggtgcccatcctgggtccgggcacccagcagccttggtccctaccgcctaccagactggagtccctggtagagcccctctagggtgtcaactcccgtgggcaggaagttttgtggagtttgttcagtgctgaactatcagggcctcccacaggtgtgcctggtatgtgcctggagctcagtgaatgaatgagaggcgggcaagctgcagacagtgacagcctgggtgctcagggctggcatggggaggtgcagggtggagtgcacagggctggagcccagaggatacctgacccagcctggggtggcagggagggcttcgtggaggagcaggtgcctcaagtggggccggagggtgagaagggatgaaccaagcagccctccggaggcctcgaggggaacagacagtgttcacaggagaaacagttacacctgcgagctctgcctcgggccagcctttgcactggaggtgggatttgaaggggagggaggggtgctgtggagcatctttttcttctgttcctgaacgggggttctgatcacatcagcctcatgcttggagcagctggttaagggcacagacaccgggacagacatccagcctgggagtcccagcgcctgacctcccctcgggcatcaagtcactccgcctctccgcgcctcagtttcctccatgatgaaaggggcctgctgaaggacctgtctcatttagggcagcagtgaggcaaagccccggagcccatgcctgtgccaagagcagggcctggcccagaatatggccttgtcacgttgagctgccttttttcagcagggttagtttcatcctggtgaggcggcgccagcatggcgttccaccttcttggcctcctctccctcctccctttcctgccatccacacctcccggccctattctcacacctcaggatggcgatatgggggcttcaccgtggtctcccctgacctcgcccctcccccggtcaggctaagtctcagattcctcctcatgggtgaggggggcagagtggcccctttcctccagcccatgctgggcacttgctagaatcccagccttggtcggggtggaggagaagcaagttccagctctccagttctgcctccatatcagagagcccacccacccctctccccagggctctatcctgcacctagtggcccctgtcactccccagccacccccacgtacataccctggtcccttgtttcaaacctggctgccccttagccgcctggccagccgcttgcaggtactcagccttgctgtgtagtcaccccctccagcccctggcacctagcctggcataggggggtgaggcggggtgtgcctgttggtgggaggctgaccctgctgaagcaaaggctgtggttggggtccccgcccagccctgccctctgtccaggcagctatgagccacgtggcccaggcccacccaccccagctccaggcccagccccgcctccctcccgccctccgtgggtggaaaccacagccgaggctcaactcctggccgcgtcaccaccgctgccctgcaggctggagcatagagcccaggcagccctcctcggtgggtgcccatgttgagggcctggggagccctggatctactctgctttcccagctggaagcctgtctgtccacaggcccgccccattgagggtggcccaggaagtgggaaagagcgtggtggaggtgagctggccaggcctcgggaggggagggggagggctagactggctgccagggaaggagggtctgcccctggccactggagccagtgtgagcatgtgcgaaggccacacctttcttggggttggagcggggtcactgtgtttccatgtgtgcgagatggcaggtgcctgtctgctggggacttgcaggcatctgagcataggtccctgagcctctctgtgggagcacgctcctggggtctggcttgcacgagggcagaagtttccgtgagactgtgcctcactcagtcactctgggtgaccctggagttgactgggtgtgcctaggtccatggaggtctccttgcctactgtgtgtggttttggggtcgggggggtgcctcctagtgtagctttgtatcttgggggttattcctaggtgcgtgtgtgtcctggggtgcagtgcggctttccctcgaagtcatggagtgtctgcggcattgtgtgtatacacacgtgtccctgtgtatctatgtgtggatctctttgggagtctctgcatctctgggtgcacgagtctttgcagtgtgtatgaaagggtcgcagtccacggtccatccatggctcttctggggcccatgtgcaggctggctgagccgcggccttcccatttgctgcgcatgtactctgagccaggctggctttaagagccgctcccccaccttctcccactgaagtctcagaagctccctctggggcacgctctgctggtgccccatattctagagacatgaacggaggctcttggtaaatgtccttttcccctgccccacggcaagcaaggcactgacccctggccaccagcctcctgagcccatggtcctgtacgggccgccgcgaggtgctcaggatgttgtagggttgagggtggattgctgctgttgccggctagccgggaagttttctttttttggcctaagataaatattggagaagaatggcccgggagctttccatgtgaccagttcatgtgcctggaggcctgtggtttgtgtggctgggtatgtatctgcatgtctgtgtgatggtcttaggactcggctctatgtggtgtcagctgcggacatcttgcatgctctggcatgtcctcacatgcatctgtgtctagggatcatgcatgtgtgtatgcatgtgtgtgagtgtgcatgtatgtgagcatgtatttgtgagcgtgtgtgtgagcatgcatgtgtgtgtgtgcatgtgtgtgcatgcatgtgagcattgtgtgagtgcgtgcgtgcatgtgtgagcgtgcgtgtgtgcacatgtgtgcatgtttgtgagtgtgcatgtgtgtgagcgtgcatgtatgtgcatgtgtgggtgtgcgtgtgtgtgcatgtgtgtgcgcgcatgtgtgagcatgcatgtgttgcgggatggcttcgctcgctgctgtgtgttgggtctgtgaggagaggccgtggttgctgcctggtgtatgtcctggcgtctgtgcacggccttgtgtgttgcatggcaggggaggtagacagtgagagggcttgggtgctggagcctgagaggggcagggcctctttcctgccacatcacccccttccccctgcccagcctcaggcgaggaataaatgacgtctgctctgatttcccaggccgtatgggctcccacacactctctgttgtggtgtccatccccaccctgagtacctctggggggtgaagggcaccagcagtgccctttgtgtctgtgcccttttgtgctgggccagattcggggcaggagggcttggccctggcatcactgggggctctgagcgccagcctgggcctagctgggtaaaggaagcatcatctcttcgttgagccacactctctgcgctgggcaagcctggggacacagagatggccccaggccctgccctcctgggtctcccagtccagtgggagaggcagacctgttatcagacaataacagcccatcaggctcctccctcccaaccctggagaaggtaagactagcatatttgctcggcagaagggaccatgcccggcatcctctgtagtgtgtttgttcattcattcattcatcattcagcagcaagaatggcagtaatgataacagcagcgagcctgcagtgaggccccactcggcaccagtcactgttgtaaatgttttacatgtgtcgtcttattcgctcgtccaacatgctcaggaggtagggactatcactacccccagtttgcagatgaggacactgaggcccagagaggttgagtcacttgtccaggggcacacagcttggagtagtagagccagtacctgggactgggcagtcggctcttaaccaccagtacaggcctgctgagcccctgtactgcgccaggcctctgctgaggacaaagcagtggctaggagagacaggccctgtcctcgtggggctgcccgttcattgcaggagacatactaattaaggactataaggacaaaggtaaaattacagctgtgacagatgctgtcaaggggaaggcacgggacatgcagggtttttttcagacagagtctcactctgtcgcccaggctggagtgcagtggcgtgatcttgactcactgcaacctccgccccctgggttcaagtgattctcgtgcctcagcctcccaagtagctgggactagaggcacatgccaccacgcccagctaatttttgtatttttttagtagggatggggttttgccatgttggccaggctggtctcgaactcctgacatcaggtgatccacctgcctcggcctcccaaagtgctgggattacaggcatgagccactgtgcccggccatggacctgcagtttgaaggaagaggaagggataacaaggtgaaggttgagggggcagggggctcttcaggacccaggctaagggcacagtccatgcagaggcctggtggcggggacggcgctatacctggaggaacgaaggagagcagggctgccccctccaccctccacagacgctgctgaatccaggccccacttccaaaggcgtcccccccactggatctgtgtctttatgggcttttacccattgtgggggctcatggatttccagaggcaccccccatgtgatttggcttttgccaggatacgctgccacttcctgagattcccagcgtaggccatgtggctgggtgggcccccctgcagtggggagggcctgggcgttcacagtgggggtaccttttgtggtgctgggacacacaccagcttacttgctgaacagccagattcagtctctgaagacccattttctccccaggcgtcaaggtcagacttccagggagtgagtgtacgaggcccagggacttgtgtctgtctcggccccatccccgtgccctgcgcctcctcagggaccaggctcattactttggtaatggcatcacccatttgttccacagatatgtctcgagcacctactgtgttccagccactgctctagatgccggcaagaaccagacagacagacaggtccctgccctcagggcactgacattctgctgggggcactgccagtcagtaggtgtaggatgccagggggtggtaagtgccacagagacataaaaagcgaggtgcacattttgttcaggggtcaggcagcctctcggaggaggttttatttgcactaagacctgaatatcaagaaaggctgagcagtgcagttctggctgagggaagataggtgcagaggcccggaggctggaacagctgtgatgagtccaagacatacacggaggcagccagcgcggctggagagaagcgaggggaggagatgaggtttgcgaggttggcagggccctcccagtcagggccgtgttgaatcagtgtttgagccaaagtgggaagccctgtagaactgtgtgtgtacatttgtgtaatgtcttcagattcccttctaaccacggtggcttttctggtcttggtctggtcattgtcagggacattgtcccttcctgtttttgtcccataaacctccaaggtcctttctttagagtggaggccttggctggagccgggaccactggggaacaggaggctgggggatgttgacttgccttctctgtgggacagagtggctgcttttgtgacctggcactggatagccctgggcagtgagttcccctctcggcctcagtttcctggtttggggaacaggaaggaagaggactccccacccagcacccagcactgtttagagggctccgcgtggcctggtctgtgtgcctggcacagcctgggcaagtccacagccacgaaggggagcccttgtgagtccacgccctgctgtaggcactgaaatgcagccatcatgaaccaaaacgcggtccctgtccatatgagtcactgacttagcgaggaagatggccacagacaggcaaacaactgtaatgtgtgaggcaacgctgagggccctggagggaacggacctaggctgactgcgccaggctccgcgccaggtgctgggggtgccacatggagcaagaccaggccaagcccctgcctatgagctcacgctgcagccctcggccagtcctgccacctccacctttacagtgtgcccagaacctgctcatgccgccccctctgcagcccccacaaggtcctgcccccttgatttccactgggccatcacagcctcctcctccctggtccccctttccgttctgcccccacagactgttcccagccagtgggagcctgtgaactcctgagtcaggcggtggccctcctgggctcagagacccctgcaactccgtctcactcgggaaaggaccaggccctcccggtggcccccaaagccccacacgatctgccccattacctccttggcctgtccttccacttgccccctcgcccaccctgctccagccacgtggcctcctcgctgtcccttgaccatatcaagcaaattcctaccgccctggctgttccttcctcctgggctgcccttcctccagagccctacatggctccctctcccctcctcacgcaggtccctgctcacgtgtccccttctcagcaaggcctgcctgaccactttattttataataatagttattattattattttgagatggagtctcacactctgtcgcccaggctggagtgcaatggtgcgatcttggctcgctgcaacttccacctcccaggttcaagcgattctcctgcctcagcctcccaagtagctgggactacaggcgcctgccaccacgccaggctaattttttgtatttttagtggagatgggatttcaccatgttggccaggctggtctccaacttctgacctcaagtgatctgcctgccttggcctccaaaagttctgggattacaggcataagccactgcacccagcctgttattcttatttttgagacaaggtctcaccctgtcacctaggctggagtgcagtggcacgatcactcactgcagcctcgacctcccaggctcgggtgattctcccgcctcagcctcctcagtagctgggaccacaggcgcacaccaccacacctggctaaatttttatttattttttatttttggggtagagacagggtctcactaggttgcccaagctgatcttgaactcctgggctcaagcgatcctccctccttggcctcccaaagtgctgggattacaggcgtgaaccaccgtgcccggccttgaccactttattgagaattccagcctcccctcccctcagctcctttctgattgctgcgttattttctatgtcagcatttctcacccgacttagtagatgtttttctgatttatctcatacattgactgcctccttccttctagaatgtgagtgctgcgaggacagggatgtttctgactgttgggtgcactgctatgggccccaggcccagcagagtcagcccttggtagacatggacgggtgcgtgggtcgatgcgtgggtgggtgtgatcgggtcacttgtgggtggagtaggtgtttgctaaggcagactctggggatgtgtcggtcccaaacctgaggactccttggaggaacgaggctcagtgtgggaggcctgaagagagatgtggttagaggagggttgggggccgtgcaggatgggggcaagagctaagccaaggtttggaggcaggaatggcttgggggactcaggacagcgaggagcctgctgtgccgggacgggaagccaaactcccagcgcctccaccatcaaagcacatgccagaaggtaggaggtaaactgaggcagggaggggccctcccagagctggtaggtgaagattgtggcagggtggtgagtgggacccaatggtggaaggctgagtgcaggctggaggcagtgagcggtctgggtccccttcctgattcgagtttcattttggtaacgatgaaaggatgcctgtggtcctggccacctcccctgctctgcccctgggcccctgtgttctgggtgggccagccccctcccttccaggggcagcagctttgatcagagcctggagggggcggggcaggaggtaagggtttttgcacgctcacgtctgctgacactgacagctttgtcgcacggtggatcttgcttttccatttgggccagttaaccttgtgggggagaatgggggtggtgggacccttttcctcccagaaaaggtcagaggatgcagggggtgactggaaaatctgaagtgtctgctaggccaggtcaacgctgcctgtcccgcatgttaaagaattcaaaagattttttaaaatttgaaataaacattttagagtaggatacaaaatgcgcttgcatttctgggatcaaatactggacttcagaggcatctgtgccccggctggggcagaaggctgcaccttcctgctgctctgggactactgcccccaggtcccagctgcttatctgaaagatttcccgggtgctgctgggccttgtccaaggcctctgagcaggggaataatgcagcggacagggacgatcattccacggagtccctactgtgtgctgccctgggctacgagggggtaagacagaggacagtccctgccctgtgaagctgacacattctaagggagaggcagatgctaaagaattacacatatggctgggcccggtggctcacgcctgtaatcccaacactttgggaggctgaggcaggtggatcacctgaggtgaggagttcaagaccagcctggccaacatggtaaaaccccatctctactaagaatacataaattagccgggtatggtggcggacgcctgtaatcccagcttcttgggaggctgaggcaggagaagcacatgaacccactaggcggaggttgcagtgagccaagatcatgccattgcactccagcctgggcaacaagagtgaaactctgtctcaaaaaaaaaaaaaaaaaaaaagaattatacacacacacacaagcacgccatatatgtggtaagagccctgaggaaagataaagcagagacaggtgtagagggcgacaggacaggagcagggcttgtgagcacaggcgggcctgggaagtcagggaaggtgggagatcagtgagaggagagttccaggtggggcactcgcccatgcaaaggccctgaggtggaaccatgtctaggatttgaggaacagcagggggacctgtgtggccagggcacagtgagtacaggggtgcttgggagaagaggagggcagcatggtgatgggcgcatcctgtggggactctcaggccacgaggaggcattttgggggccagcaaagggtttaaggctgtgaactctggagtgggcaggactctggaatgggcaggactctggcttccaggcccagctctgctcggtgagcttagtgagagattttacctttgtgagtctctgtttccacagctgcaaaatggggctcagaatggccactccaccgtggttgagggcgcctgcgagctcagcgtcagcgtctgctctgggccatgggtcccttgtggtggtggcgatggtggtgggagtaccgagctgagcctcaggccacatttggtgggaggggttggttttaagcatctttcctgctgcacaggcccatgggaaaggctggtgtacagccattggggaggtgggggccccggggcccactttgtgcttcctcccactacccgtggggtccaggacaggtcacacaggagggagggaccctcactcagcagagactaggcaggagaggaaaggcaaggtctgggtgtagacagaaagaatgggaacggagggagaggggaggccaggaccagccttgagaggatgatgatgatgatgataataataataataataataataaggccgggcgcggtggctcacgcctgtaatcccagcattttggaaggccgaggcaggtggatcatgaggtcaggagatcgagaccatcctgcctaacacagtgaaaccccatctctactaaaaatacaaaaaaaaaaaaaaaaaaattagccgggcatggtggtgggcacctatagtcccagctactggggaggctgaggcaggagaatggcgcaaacccgggaggcggaggttgcagtgagctgagattgcaccactgcactccagcctgggcgacagagcaagactccctctcaaaataaataaataaataaataaataaataaataaataaaataataatagacaaaaccaacagtgtcacctcagccctccagggcagcaggacaggcaggtaagagcccagccttcagtgccttccatacacaaccgcccaggttcaaatcctggctgcttctcatgtctgcctctcactggctgcttctcctgtccatgccctggacaagggccttcccttctctgggcctcagttttcccattcatgaattgggatgaggatgcttgtgaggatggaacgggattagacgcacagcagggccggaacccgcgaatctctgcagacaggcctggagtctggtgtccactctgccaccctagctgggccacctgggttaatgaggtccccctctgtgccttgttttccctgtctgtaatccggggcttattaatggcccctccctccaggatcatatgtgggactccgggtaaagtgcctggaagagggctggtatacagtaggtactcagtaagtgctggctgctattggaatggtgaccggcacttactgagcacttactgtgtgtgtgatttgccttggttctgatcccaaccactgtctctgggccaggccctccgtgccctctgttctgcgtaattccttataaaaactccaggaaggccaggcgcagggctcacgcctgtaatcctaacactttgggaagccaaggcagatcactagaggtcagaccagcctggccaacatggtgaaaccccatctctactaaaaatacaaaaattagctgggcgtggtggcaggcgcctgtaatcccagctacttgggaggctgaggcaggagaattgcttgaagccgggaggcggaggttgcagtgagccaagatcgcaccactgcactccagcctgggcgacagagcaagactccgtttaaaataaataaataaatactccacgaagcagctactattatcgccgtctttgaacagaggaggaaactgaggcacagcgtggctgagttgctcacccagggccacatattgaggtccccaggttgggttagagctccagttcacagacacagaaagtgaggtcatatagggccagtcgtggcagccctgctggggtttggagccctaggcagcctgactgccaagcttggagctggcctgggagcccagcccccacccttccctccctgcacctgggcaagcccagcctttctgcctagctcttctccctcttcccaggcctggcacggcctctgtggcccccatgaggtcaggagcatctgttgggaagggagcgcctgctggggaagccggcagggcttggagctgcacaggacggcccagggtggggtccctgcctggtcattataaacatgttcagttcctctgtttgtcctgccctctgtgcagtgcccagagggaaggggtggccccaggcaaatatccggaggcgtgccccttgcccccttcccttgggggtttatgggtgggagggcaggaggccaggcgtcggaggacatcccccagaccccatgctgccagctgggccagccgcccgccctccaggctgctcttgccccgtccccaggtgtcccccacctcagggtctgccccgctgtccgccctccgggcttagtgaggggtcacatggctgatcctcttcccgtggctctgggaactgcctagtgccccgcagtggggagggagcgggatggggcggggcgacaggttcacgatgaagaggcctgggctgggcatggggccaaagggggtggagggacatctgggaggacggagaggccggaggacatgggacgcagatctggaatgacagcaggcagagtgggcaaatggggactgttggggtatgtggatgaccctgggagctgggcctagaaagccatgagagagtaggtcagggccaccaggggtgggctgggctggaaggccacgagggaggggtgggcagcactcagggcgccagcattgggctcagagaaggggctgggcagagacaaaggaggccccccgtccgccctccatcctgggccccagggcaagcagggaaactgggccaaccctgggagccttggccaggcccggctctgaccacccgctggcctcttgggaccagctgagacaggttggctgccgggcccccacccccctcccacggggctcccgctgccaaaccggttcccctggctggctcccatggatggtcctagctctgggcagggcctcacctttcccagctgctcccaggaaggcagcctgagccgggaggagaagtaggtgtggaggggctacgtgcatctgcgcgtcctctgtcctctcactagggctacaggacttgctgtgccacgcgctgtgccaggcgcgggggagccagctgggacaagacagaacagaaactccacctgcatgtcccctcgtcccctggtctcaactcttcccctcttcctggaagccttcctgctgcccaccccgcgtccctccagactgggtcccgtgctcccgtcccccagccctgaccaccctgggcagctgctgcatggggacaggtctgtctgccccacacgaatttcccatgaggtcaaaggctgtctgggtcactgcagtggccacagaggaggcccattgctgagttattcccaaatgaatgaatgaatgagtgagtgaatggatgcattcctctcattttacagatgagtaacccgaagcccctagaggagtggtcacctgcctgagggcacttctgtcccaccagcatcagaccaggtgtgtgcaggtgtgtgcgactccagggcccaggcccggggcagctggggtggggccttaggggggagcaggacctgggcccctcctcccacaggcactgtgggagccgccccagccatcacagtggtccccaccgataggccccccatatttgcccagccctgcaccaagctctttgctcccagtcacccattacccctcgcagcagccctgtgggggttcatccacagcacagagaggttgtcacctgcccaaggtcacggcagcatgtgatggagagtcgaactctggcctcttggctccccctcccatctttctccaggctctctatgggatgccgccatcagaatgtctcttcctcagcccctttgttttttaaagtggctttggtcgaccatttgctctgtgcttggtactgtgtcaagggcccgattgaagaccacagatcctaaagataggggagtgtcgcgacaaggctgcctggggtgccctcttaacccaggggatcagtaaccctgtgctgagtcaatatccaaaggtgtgggcgtccccagcccagactcatggctggaccagtggcagtggccaggccatcagtgaccgtccatccagtacacaccatgtaccaggcatagcaggggatgtggggaagcggggcagacgagacccagccagaatgtggcactgacactctagcggtgcggtgtggatgctgcactcatgaacctaagaaggaacaacaaacaggatttccatgagttccgggctgtgactgtgatgtagagcggggggacggcgggacacggggctctttgccttggggtggtcaggaaaggagtcactgctgctctgagaactgaaggaggggacggggagccctgtgcagacactgggaagtgagctcctggcagaggggccagcccgtgcaaaggctctgaggtctccagggggggtgagaacagagaggtgatggggccttgtgggcccgcaggagacagagcggcaggaaagttctgagcagagggacgtgaccgctcgggtgctcacgggtaccctctggctgtgtgtgccacacagatgggcgcagggggtgggcagggagacccagaaggaggctactgcctcctgttggtcccggtgtaagatgaggatgggagggacagagcaggggcagaggaggaagagacatgggcaggctctcactcacccaccgtgattccctcccgcaggccgcaccgagtccccggcaccatgtttgggaagaggaagaagcgggtggagatctccgcgccgtccaacttcgagcaccgcgtgcacacgggcttcgaccagcacgagcagaagttcacggggctgccccgccagtggcagagcctgatcgaggagtcggctcgccggcccaagcccctcgtcgaccccgcctgcatcacctccatccagcccggggcccccaaggtatgtggcacccaccaccacctcccccagcccaccccaacccccgagtggccctggccctcaaccccacactcgaccctgtgaccgacacctcctcactgacatggaaatggagacaaaccccagccttccacccctatcctgggtccagtgctggcctttcaccctccacccactggctccaagtcctaagaacccatgccaccccaacctgagcctcccccacggcccatctgacagcccccacaccagcctccaagctctgctgtctcccgcagactcatgtcccgggggccatgctgctgtaccccggaccacactcctgtctcacccaaccttgagcctttccagagctcctggcagtggaagacagacccattcccagagggtgacagccccaagtggtcagggcttgggtgggggagcccggaggaggcacctgacacagaccaggggtccaggcaagcttctgggaggaggggacaccgaggcagagcccagggctgaggaggaggaggagaaattccagcagatgctggggaagccgggctttagtggagaaaatcactcctgtgaaacgctgggggctttttggttttgggtttttttttttcttcctgccatctagagcaaaatggcaaggttgggatttgaaccaatgtctgtttccaaggcccgtgctcttaacccctctgctgcctccatgtgaaatcataagagttgtggagccggtgtctgggtgtggcctggcatgaggctggcctggcctgagcccgtgctgggcctctgaagccagccttggagcctggactctctcccatggtcagtggggaccaggaggggccgcaggccaaggggaactcggccaggtttgcatccagcgggtggagatgggtgtgcctggggactcaccctcccggtgcccagcccagcctggcggggagaagccccaaggcccacaagttggccatagacacaagtgcagcctcaatgtggtagcccactgaggggtccgtgtggtccttgcagggtgcttttgaatgctttgacttctttgcctccactgagaaagtgacagacttcacttccaaagccgtttctggcatctggtgacagaccagctggaggcgagtggcagctgcctccacgggcagggcactggctcttctgggccacaggccgcacccgacccacctcagctccacgccctgcctggctctgtggccacttgcatgtaggctttgcccccaccaaggtgtctccaaaaacccagcccctgcctggcttgccagatgtgaggcctgcctgtgactgtcccagcaggaggcagggcacttgaattcacacatggggccttgtggccagcactgtcctggggccccataggcacttgtgtttgctgcccttgaccgggcctcaggcctcccaggaccttctcgactccctgttggtttttttttttttttttttgagagacattcctgctctgtctccctggctggagtgcagtggcgccacctcggctcatgcaaccttcgcctcctgggttcaagcgattttcctgcctcagcctcccgcgtagctgggattacaggcgcccaccactatgcccatctaatttttgtatttttagtagagacgggttttcgccattttggccaggctggtctcaaactcctgacctcaggtgatcctcagcctcccgaggtgctgggattataggcgtgagccactgcttcttgcctcaacgccctgttctaacagcaaagtctggccttgtgtccaccttgacttcctggggcccctgggcaaggcccggcttcaggcagacagccacggccaggagagacagggcagcggcagaccacggattttgtgggatcagtgttttctacacgttacaggcaggcctctggctggaggatgcctggcagccccaggcagggtccgggtttcgtgggatcagtgttttccacacattagaggcaggcctccggctggaggacatctggcagccccgggcagggtccttgtcagcagggcccacgttctcagctcactgtggcctttgcacagacacctcactcactacgtggtttagcaaaagttcactgagcccctgctgtgcgccagatgctggtctaggtgctgagatggagcaggacccgaagcagacaggaaaaaacaatccctgcccagagcatgcactaggcagagccgggagcagacagatgcctgtgtgctctgtatcagctgctgttaggtgctctaggtagaatgcaggcagggcaggggccggggagggcaggggctggcattttagatgatgggaggccagcagaagcctcactgagaagctgagttttgagcaaagacctgaaggagtggagggagggagccacagggaccctgagagctgatgttccaggcagagggagccgccagcggagaggccctgggcgcaggggggcgggggtgggggagacacccgtgtgtctggaaatggaacgggggcagagggggcctgcaggacacgactcagaccacagagggtggggaccgggtgactcgggatgcactggatgctctgcctggtccccatctgcatttgcatttgccacccggctcctgggacccccttgccctctactttgggaccaggcctttctgactctccctgtcccccactccttgttgttcatgggagcagagagtgtggttttggggctaaggaacactggcgcccacatgggaggaagtgccaggccaggccctggccccagcgccctgtcatttgcagccctcggggctgattatggggtgggtcaatttctgcccttcctcccccaaacccctcagggcaggactattccaccagtgtgaggaacaggagaaaaacaaggggggcctctccagggtcccaccgagcccagggggcagcagcctggccatggcgatcactcctctggcccctgcagctgtgtccccagggaggggaggggctgcactgcccatgccattgtcactccatggcatctcttcattgcgtctctgtcttgtctctgtgtgtgtcgtgctgtcctgtccctgcgtgtcggatgcacgtcctgtgtgccccactccttgctgggcccccacccaccattgcctgggaccccagaccatcgtgcggggcagcaaaggtgccaaagatggggccctcacgctgctgctggacgagtttgagaacatgtcggtgacacgctccaactccctgcggagagacagcccgccgccgcccgcccgtgcccgccaggaaaatgggatgccagaggagccggccaccacggccagagggggcccagggaaggcaggcagccgaggccggttcgccggtcacagcgaggcgggtggcggcagtggtgacaggcgacgggcggggccagagaagaggcccaagtcttccagggagggctcagggggtccccaggagtcctcccgggacaaacgccccctctccgggcctgatgtcggcaccccccagcctgctggtctggccagtggggcgaaactggcagctggccggccctttaacacctacccgagggctgacacggaccacccatcccggggtgcccaggtaacccatcccccgccccagggcccccactgtcccctgcccgttgctcctctgtccccaccttccagccccgccccaccaccgtgcatctcatcctgaccacccatgtgtctgtcccatcgctgggtctctctcctgcttagggagcagagctgctccctggcacccatcactgacagctacctctcttctgtttcagggggagcctcatgacgtggcccctaacgggccatcagcggggggcctggccatcccccagtcctcctcctcctcctcccggcctcccacccgagcccgaggtgcccccagccctggagtgctgggaccccacgcctcagagccccagctggcccctccagcctgcacccccgccgcccctgctgttcctgggccccctggcccccgctcaccacagcgggagccacagcgagtatcccatgagcagttccgggctgccctgcagctggtggtggacccaggcgacccccgctcctacctggacaacttcatcaagattggcgagggctccacgggcatcgtgtgcatcgccaccgtgcgcagctcgggcaagctggtggccgtcaagaagatggacctgcgcaagcagcagaggcgcgagctgctcttcaacgaggtgcgggcgctgctgccctgccgccctgctggtcctcccacccctccctcccaccctccctcccctcctccctcctctccctgcactcctccgtgctgggccaggctcccctcctcccctcactcttctccctccccaggccgtctcgtccgccccagctgggtccctgcctctgtcctcacagcaccctcacccacatctctgtccctgagccccagacccagggttcctcgggccactgacccccgacccagtgtcttccaggcccctcgcacccactgaggcccgcctgggctccagggtacagtgtcctccagacctgcccctcctgggttccctgtgccccgccctggcctccactcctgggtgtccctcggcacagcccacacaaccaccaagagtatgtttctgacgttcaggcccaccccctccccgtccctccttagagaccctggcagtgccccgtagcaccctgacgataggaagcccaggtccctttgccgggtgtgtgaggcccctctcgaccccgttgcccatcacagtgccgggctgcaccatggagctcctcgcctgggttcctcatcctcccgccgacacacgcctcttctctcatccttgcccttgtccgggtctcagccctgtgattgaacgctctcttcccacctgccccccagcactagcccaggactgacctgagatgggcgtgtgcccaggggggcgcgcccccagaagggaggcgtgggcttcaagctggctctgaggcccacgtggctgtggcagtaggggagggcagtccaggtggccccagtgagcacaagcttaatgtggaactgcagggggagccaggggggtggcggtggctgggtctggcactggcagccctcccgcctccctccaccactgacccagcccctgcacaggtggtaatcatgagggactaccagcacgagaatgtggtggagatgtacaacagctacctggtgggggacgagctctgggtggtcatggagttcctggaaggaggcgccctcaccgacatcgtcacccacaccaggtatttctggggcctcagacccctcctgtgacacgaccaagtcccctccagaccactaggggtggggccacatctccaaaccagctgtgctccgggcccctgggatggggtcgtgtcttccattcctcccactccagagtggggtcgagtggtctcagattcctcccactgcaaggcagggctgcgtccccctcggcaccccggggtgctgtccagctggctgctcaccccccaccccaccccgcaggatgaacgaggagcagatcgcggccgtgtgccttgcagtgctgcaggccctgtcggtgctccacgcccagggcgtcatccaccgggacatcaagagcgactcgatcctgctgacccatgatggcagggtgaggggacgggcggcggggtacgggggcggcaggtttccggctgcggggcttccctgcctcttcccatcccctgtgagggtaggtgagctctgacccccaggtctgtgtcttgaggagctgggaacttcgtccctccctggtggagcagcccagagtcaggttccagctcagtggggactctgtgcagtgggagggcacaggctggcgggggctctgccatcagcacaggacactgggcccaggggcagggatctgggcagacagcgcagcccccgccacaggcttcttcctccactgaaaagctgctccctgcccagcacccagggcggtccatggaccccagtcctgtcttccatgctttggactgaggttccaaatctgaggctgtgacaattataacgtcgggtggacatgattttctgtgagagagggcccttgacttgaatgaaatgcttgcagaagtggatgactccatcccctcccccaaggaagattaagccacaccattagtccaggcagaggcagagagagctctgtgtcactgacagtctgaaaatctccagatgtctatagatgtgttttgggggcgatgtctatgggccacctgagattgtccacacacggttgtggggatgtttgctggaggcaggaagacccatagaaatcctcaaaaatcggaaagggacccacagttcctaagaaggtgtgagaggcctggttgtcgcaaaggcaggctgtgtcccctcacggccctagtgcagggctactttctgctccaaccgaactaaagacttgttccagggcagcagggccccagggcacaggcttttggggccacccctgttcccagctccggccctgcctttgctatctgcagtactcaggccagtgtccccaaaagccccagaggctgtcagggagggaaatggggggatcgtgggggaggtgacttgcccgagggcccccaccaggaggtggtggagctccccattggtctggctctagaccccagctctgaccctagaccccagctctgacctctgggccgcacattgtgtctgaagccaaggaatgacgcaggcagacgcccctgctcgccctcctgctgtgccagctcctctgaccccactgcctctgccctgtcccaggtgaagctgtcagactttgggttctgcgcccaggtgagcaaggaagtgccccgaaggaagtcgctggtcggcacgccctactggatggccccagagctcatctcccgccttccctacgggccagaggtgagccccggggtggcttggttgtcccgccgtggacagcgtacgctgccattttccagctgcagcgctggcgggagatggggcccagtctggggagtcattgccaggaatggtgctctggacaaggaggtactgcaggcatgcatgtattcattcttcttttttttttttgagatggagtctcgctctgttgcccaggctggagtgcagtggtgcaatctcagctcactgcaacctccacctcccgggttcaagcgattctcctgcctcagcctcccgagaagctggttttacaggcacccgccaccatgcctggctaatttttgtattagtagagatgggggtttcaccatgttggccaggttggtcttgaactcctgacctcaggtgatctatccgccttggcctcctaaagtgctgggattacagatgtgagccaccgcgcccagccttggctctgccttctgagcattgttttcacaggccggctttccccttgtgggagcagagctggtcccggcagctctgggaagtgtctcccacctatgggctcctctttttccctgggtgttttgggtaaagtccccaggttggctctgattggctcagcctgggtcctgtgcctgtttctgaaccaatcactgtgtctccactgtggtgatgaggccgcatgggtcctgaacccaccagtggatgctacctgggctgagggagggaggacacctgggggcagttgacagaaagaagaggggtgggtgctgggggggcagctctcttgaggggctccctggaggactagtgctctgtggactgctggctgggtgcccaagagggagttctgggccaaggactccaggagccagaggcagagacagcgctggagcggtccctgcctgaggcctccccaggacccaccatcccccaacagctcagccctgctgtcccttctcccgccccaggtagacatctggtcgctggggataatggtgattgagatggtggacggagagcccccctacttcaacgagccacccctcaaagccatgaagatgattcgggacaacctgccaccccgactgaagaacctgcacaaggtaggcccctccctggctgggaaactgtgcgccagctggcgggtggcagggctccaggtggagcatggggtgtggatgggatggggacaatgatggcgcctgggatggcgcttactgtgtgctgggccccccacccccgggcctcatgtgtctgtgcagaccccctctgtggggcctgggcgacagaggcagcagagccacaggccctctgcaccctcaccattgccctgggccccacccagccctagagagatttgcacgtttagaagtggaggacagggccgggaccttcctagtggaggacttgccaggagggaaaggggcacctctgggccccagttgctttcagcttcttgctaaaccatggaaatagggagtacatgagcccccagggtttgtcacttcctctggggccacatagtaagcgccatcacaggtgccatcactgtccctgtcccgtctacaccccaagatctagacacccatgacctccgccccctgccctcctgcacagtacatgccgccagccgacttggcagaggcggacactgcagccctacagcaaatgaacagtggggagcctcgccccctgaccctcccctccttctcgacaggtgtcgccatccctgaagggcttcctggaccgcctgctggtgcgagaccctgcccagcgggccacggcagccgagctgctgaagcacccattcctggccaaggcagggccgcctgccagcatcgtgcccctcatgcgccagaaccgcaccagatgaggcccagcgcccttcccctcaaccaaagagccccccgggtcacccccgccccactgaggccagtagggggccaggcctcccactcctcccagcccgggagatgctccgcgtggcaccaccctccttgctgggggtagatgagaccctactactgaactccagttttgatctcgtgacttttagaaaaacacagggactcgtgggagcaagcgaggctcccaggacccccaccctctgggacaggccctcccccatgttcttctgtctccaggaagggcagcggccctcccatcactggaagtctgcagtgggggtcgctgggggtggagagaacactaagaggtgaacatgtatgagtgtgtgcacgcgtgtgagtgtgcatgtgtgtgtgtgcaaaggtccagccaccccgtcctccagcctgcaaggggtgtctggcgccttgcctgacacccagccccctctccccctgagccattgtgggggtcgatcatgaatgtccgaagagtggccttttcccgtagccctgcgccccctttctgtggctggatggggagacaggtcagggccccccaccctctccagcccctgcagcaaatgactactgcacctggacagcctcctcttttctagaagtctatttatattgtcattttataacactctagcccctgcccttattgggggacagatggtccctgtcctgcggggtggccctggcagaaccactgcctgaagaaccaggttcctgcccggtcagcgcagccccagcccgcccacccctgcctcgagttagttttacaattaaaacattgtcttgttttgtgtctgtgtgcgatgtgtggggggcagggggccctgcccggctgtcttgggtgggaatttgcagggagagggtctggatctgggagcaaaccacgattccagccaaggcagggcaagggtggggtggggagtggggagttcaggtcatagcagccagtaagctcccccagcctgccactccccagaatggggcaggattgtccccacccctggaagcagccagtttgccacagtccatgtgcagactgatcccagtttgccaaatctgcaatttcctggaaccttttaaaggctgtcttgagcgcgtttggtgagtaggagctaacccaagttagtaaattgaaggccatttggcaaattggtcagtgggcagatgggcttttggggattgactgaggctgactggcctggagctgctggcttcggagagacaccctgtgaagtgtgtccttccacgcaggagcccagagccgagcccacgctggggggaatctgactggcatggaggtggccatgccaccatcgctgctgcagctgcatcctggcactttgcgcctcaggccctgttgggctccactttctgcatcctccccagcccccagggaggcagtggagtggggagagagccaggagtgagcctccgtccccaaagccagccaggcgtcatcagcaccagagacctcagcctggtcctctcgggaagtgagtggccagggcagagattccaggttagtccacgcctcccacccttcacaggtcctgaccccaagaatcagagcactgtgtgtgtggcagggcctatgccaagtgcaaacacagcctagatggatcatcacagagtgaaacccagcggtgcaagcagctgtgctctctgcgatgtattggaggcttaggtgaggtggatgcctttctggaaaaaaaaaaaatgctaacattggcaaaagaagaaatagaaaacaagaccaaaataactgtctcctcactgcacacacactccagaataaataaaaggtttcaggcttgaatgcactttcaaatgagattttttttttttttttgagacggagtatcgctctgtcgcccaggctggagtgcagtggcacgatcttggctcactgcaacttctgcctcctgggttcaagcgattctcctgcctcagcctcccaagtagctgggattacaggcgcttgccaccacgccaggctaattttttgtattttgagtagagactggatttcgccatcttggccagactggtcttgaactcctgacctcgtgatccacccacctcagcctcccaaagtgctgggattacaggcatgagccaccatgcctggcctcaaatgaggtttaccagactttgaaggagcaggtaattccttctaccttgtgaacaagttgttccagaaagatagcagctcaggaggcctctgtgaccatggttccagacccagataaggacggcaaagaacagagcatctcagaaacgcaaggctcacagccagggtgcccggcgaccccacgggcactgagaacagctagctctaggagctccactctcctgctgaagaaaccacgggctcagagacggggagctccctcgcccagccacatctgtgaccccacggtaactctgctggttttggtgccttcagtcactcactgcaggtttgttttgttttgttttgttttgagtttttttgttttttgttttttgtttttagagacaagatgttgctatgttgcctaggctggtttcgaactcctggcctcaagggatcctccctccttggccccgcaaagtgctgggattacaggcgtgagccaccgtgcccagcccgctcactgcagtttgaaggcatggctttgggtggcgtggggtgaaagctgcccgaggccccgttcctccccacgtggctgcctcctgccagagccagtcaggaaaacagaccccaactagagttgtttcaaatggcagggatttggtaccggtggttggatcatgacaaagctctgagaaggctggaggagccacagagtgccaagtgcccagcaatcattagaggaaggaggctgctgccacctgtgtggctagaggaacagaggggccaatggcattccccaaaccccactctcgcctctgtctggccagagcagaatggcttcttccagcttcccaccctggactcccacccaggagcctcctcctggcagacccttcctgaccccaccggcccggggggtctacagatccatgtttcaggcgtccgcctggagcggaacaggggagtgcttaggacaagggtggtgccagaggatccactctgcccacatttagttgaccagctgaggcactccacgggaatgaatgactctcgacaggtgccggaggtgaggaggggcccggaggcccaggaggggcacagggatggattcgtccgcctgggggctggaggtgtgtttacagagccccaaaataaacaatgcaaccaggtcagaccagcggttctcacagtgtggttcccagaccagcagcatcactgggagcttactggacacgcaaataaatccctgtgtgccaccccagctgcatcagatgctggtggggcccagtgatctgtatttaacacaccctccgggggatgccggtgcccactcacgtttgagaacccctgcgatccacgactgccctcccgtgtaaaaggcccacctctgtgggactccaagtcatcagcaccctagggtccttccgtctttttccttcctcctgggacacctgcctctcccatgtcgtattagagaattccttatgctcccaagtgggcacggggagaggaaggcactcctctttaaggaccgacccagaggttttgccattgcttcactggccagagcttagtcacgcagcctcacccagaggcaagggaggttggaaaatgtagtgtttgtgtgtgtctaacacaaattctattaccatgcagtcaggattctccactcttgctctttcattagatttgctgggcttcaccctggactttctgatttagtgacagaacagagaacccagaggcagacccagatgtgtacaagggcttcatatacaatcaggagatttaataatcatgctaggggccgggtgcagtggctcacgcctgtaatcccaagcactttggggagccgaggcaggcagatcacttgaggtcaggagtttgagaccagcctgggcaacaaagtgagaccctgtctctactaaaaataacaaaaattagccgggcgtggtggtgggcgcctgtaatcccagctcctcgggtggctgaggcatgagaatcacttgaacccaggaggcagaggtttcagtgagctgagatcacatcactgcactccagcctgggtgacagagtgagattctgtcaaaaaaaaaaaaagacaaaaaacaacaggtacggtggcttacacctgtaatcccagcagtttgtgaggccgaggtgggcagatcacctgaggtcaggagttcaggaccagcctggccaccatggtgaaaccctatctctagtaaaaatacaaaaaaattagccaggcatggtggcgggtgcctgtaatcccacctatttgggaggctgaggcaggcggattgcttgaatccgggagttggaggttgcagtgagctgagatcacgccactgcactccagcctgggcaacaagagcaaaactccatctcaaaaaaaaaataattttcatttgtaataggtatcagaatggggaaaaatatttgcagagtctagcactgataagatatcttcttaacaagaaaaagagaccagccataacaggacaatgggcaaaggatatgaacaggcaatttagagaagaaagaactcaaagcccagtaagggtgttcacagctgctcaaactcgttagtcatcagagacatgcacgttcaaaccgtgcggcggtattttacaccatgagtctgataaaaacagatccagcttagtcaagtgttgcacatatgtatctcccaatgattccaatagtcacacccgggtgacttcccaaagaaactctctggacctgaggaagagtcgatgaggacgttcactgtagcattatttgtggggtggagctggaggcaggggcatgtccaccccaggggagtgggtggctaaacagaaggggtgcacccccaaaattcctgtccagacagcaggtaagaaaaacaataataagattcataatacaaggctgggtgtataaatagcaaattatggacataaaacaatggtcctcattttgcaaggttaggagactcatttgcatattagcatggctgccactggggagggagaggggtgagggaaagaatgaatgaactgcagatcttgggagaaatgaaggccttgaaggccacactgaggcttggttctctaagcaaaggggaactcccttttgtgtggcttggggcctggtcacaggtatttaatataaaaataagccaggtgatcctaacatacagccaggattgagaatgggagaatgggctgggcaaggtggctcacacctgtaatcccagcactttgggaggcagaggtgggtggatcacctgagtttaggagttccagaccagcctggccgacatggtgaaaccccgtctctactaagaatacaaaaattagccacgcatggtggcgggcgcttgtaatcccagctactcgggaggctgaggcaggagaactgcttgaacctgggaggtggaggttgcagtgagccaagatcgtgccattgcacaccagcctgggcaacgagcgaaactccatctcaaaaacaaaaaacattgatcgaagtctggctgtgttcaggggctttgctaagctcctagttttgcgccatttaactcctgtagtggttaccaccccccaaggaaaaggttccccccaccaaaaaaaaaaatagattcccccccactcacaaaaaaagataggtccacggaaaatctgtgagtgtggccttatttgggaaaagggtctttgcagatgtgtcctgagttaaggatctggaaatgaggtcaccctggtgtatccgggtgggctcttatctactgaaaagtgtcctttagagaaatgcagaggagatttggggcacacagagaagcagccatgagtcaggaaaagccaggggccttccaggagaagccagaaggggccaggaagcaatctgtcctgaaggcttcagagggaggagagccctgtccacacctgcacttcagacttcggcttccagaactgagagaatacagccaggcatggaggctcacgcctgtaatcccaacactttgggaggccaaggcaggtgaatcacttgaggccaggagttcgaaaccagcctggccaacatggcgaaaacctgtctctactaaaaacacaaaaattagccgggtgtggtggtgggcacctgtaatcccagctactcaggaggcagaggcaggagaattgcttgaacctgggaggcagagattgcagtgagccgagatcgcaccactgcactccagcctgggcaacagagcgagactcgtcctcaaaacaacaacaacaacaacaaaccagaactgagagaatacatggctgctgtttcaagccaccacgctgggaatttgtgatcgcagcccaggaaacatgaccctcgtagccgccttctgcggaactactgtaccttccttggcctgtttcacagatgagagacaggaacaaagatgtcaacctgaggtcacagagccagaaagtgatagaggcaggattcgaatcctggcatcgggcctgggagttcctgcatatcctcaccatgcagcactgagaagtgggtcagggctcccttcactaccccacttgtgggaccacagttaccaacagagaagtgcctgtgtcttcccaggtggctggtcacggaaggagggcaggccccaagccgcagactccaaaagggaggctgtcgtcctagggtgatccatggagacttggggtggagaggtgttggctgggggatgagatggggcagcaagcagggtcctggactgcccttgggggacacgggggcagctcagagccacgcttggggactgctggattatacgaaggtgaactctctgttccctcctctccctgcatcttttttcttttctttttttttgagatggagtctcgctctgtcgcccaggctgaagtgcagtgtcgagaccttggctcactgcaacctctgcctcctgggttcaagcaattctcctgcctcagccacctgagtagctgggattacaggcacaggccaccacgcccggctaatttttgtatttttagtacagacgaggtttcaccatgttggccaggctggtttcgaactcctgacctcaagttatctgcgcgcctcagcctccaaagtggtggaattacaggcatgagccaccgcgcccagcctcctcctacgtctttgtctctgccttcctttgtctctctctttcattctcctgcttagtctttttcattatttgaacaggtggcccaagcccatggtacaaaatgtaaaagatcccaaagggaataaatgggaaaatcagcctccctcccaccttacctccttccccatgcccagcctctcagttctgctccccagaggcagccactgatacaagtttcttgtgcttccttccagatatgtctgcatgtaccaggaaatacttacatgcatatacagacatgtattttccttcatacagatagcataatgggccaggcacggtggctcatgcctataatcccagcactttgggaggctgaggcgggtggatcacctggagtcaggagttcgagaccagcctgaccaacatggtaaaaccccgtctctactaaaagtacaaaaattagccgggcatggtggcttgcgcctgtaatcccagctacttgggaggctgaggccggagaatcacttgaacccgggaggcagaagttgcagtgagccgagattgtgccattgcactccagcctgggcgacagagagtctgtctcaaaaaataaaaataaaaaaaatgttgaatgttggcataacgggcacatccctctgccccttactttttcctacttaacaatgtatcttggtggttgttccctgctggtacataaaaagcaattttgatcctgttagcggctgtgtaatattccattgaacagaggaaccatgaatgataggaacagccactgtcactggacatttagggggcttggagtcgtttggtgttttttattttattttgttttttattttattttgagacaaggtctcactcgctctgtcgcccagcctggagtgtagtggcacaatctcagctcactgcaacctccgcctcctgggctcaagtgattctcccacctcagcctctcaagtagctaggattacaggtatgtgccaccacgcctggctaatttttttattttattttattttattttttatttatttatttttttgagatggagtctcgctctgtcgcccaggctggagtgcagtggcgtgatctcggctcactgcaagctctgcctcccgggttcacgccattctcctgcctcagcctcccaagtagctggggctacaggtgcccgccaccacgcccagctaatttttttgtatttttaggagagactgggtttcaccgtgttagccaggatggtctcgatctcctgacctcgtgatccacccgcctcggcctcccgaagtcctgggattacaggcgtgagccaccgtgcccggccaatttttttcttttttgtagagatggggtttcaccatgttgcccaggctgttctggaactcttgagctcaagcgatcctcccgtcttggcctcccaaagtgttgggattacaggggccctctcttcctgttttctggctctttgtgtatcttgttgctgtctctgcctctccctgtccacactcttccctccttctatccaacctcagtcctgcctctctgtcgccccctgcagggtgaagtgggctcactgcccctccaacctcacaaacctctgtggtttgtatctggggcagacagcacccaccccagcccacctttctactacccctgccccctcccgacctggctgcactttcccaccctccacagccctgatagagagcccaggatctgctcccccagccccaggtgcccaccctccaggacccctgcccttccccctctaccagcaggcttgggccccaggacgtgctgactcctgggggtgacaggttttgcagcaggtgcagtgggagctaggcttgggcaagttggaagcggtgcctcggctgggtcagagcctcttcctcctgccgcccagccgggccttcctgccctccctgcccagcaagcagagcaacgtcaggtcagccctgggctggggacagacaataaacagacctgcccaaggccctgccctggtgaggatgacattcgggcagggtgagagactgtgatccagtgacagccacacgcacagaggtatttacaaagcatgctgaatgcaagaaaggacgaatggggtgtgatagagaatagcagggaaggggaatttatctggcctggggatggcccagctctctttctttgtaccagtagagaacaatcaccaaaccatcttgttaggcagaaaaaagcaagaagggtgtgtgccgtatgacaaggtgacttgttttgttttgttgagacagtctctgtcacccaggctggagtgcagcggcacgatcttggctcactgcagcctcgacttcccaggctcaagtgatcctcccacctcagcctccgaagtaggtggaaccagaggcacttcccaccatgcctgtttttttttgttgttgtttgtttgtttttggtagagacaggggtctcgctatgttgcccaggcttgtctcaaactcctgagctcaagccatcctcctacctcagcctcccaaagtgctataattacaggcactgcaccaggccagtttttttgttttgttttgttttgttgagacggagtcttgctctgtcacccaggctggagtgcagtggcactatctcagctcactgcaacctctgcctcccaggctcaagcgattctcctgcctcagcctcctgagtagctgggattacaggcatgcaccaccatgcctcgctagttgttgtatttttggtagaaacggggtttcgccatgttggccaggctggtcttgaactcctgacctcaagtgatccgcctgcctcagcctcccaaagtgcccggattacaggtgtgagccaccatgcccggccattggccggcttttattatttcatctagttccctggttgtcgacaaggtgatgcttcccagattttcatctcagccccgacccctctctcagactccagccggtacatccagttgcccctggcatcacccctgcggatacctcgtacttcacatatatgcatggagtacttgatttcccaagaaccccctcaaagagctgccccattctgtctgacctcatctccccttcattctcttcaccccacactggcctccgtgctcttccccaacccaccaaaccccgtcgcacctcaaggcctttgcactgactgtttcctctcccagaatgctcctctcctaggcctttgtgcagctaattccttccccttcttcaggtttctgctcaaatatcacctcctccgagaagccctccctgaccaccccaactaggcaaggcttccacctgctcttctctgccctgacagcgcattcttcaccttcaaggcacttagtgctgtttgtcaattaactagttacttgttgaattgtaactagttaattgacatcccttcccccacaaggctgcaagccccgtggggacaggaatggtgtctgttctttcaccacattacaccccagtgcacagggcttggccattgaaggcatctcataaacatctgttgaaagaacaggtggtagaaagcaatgagaggctccggaccttgtttgctttataaaaattatattttttatcagcctgggtaacatggggagacccccatctctacaaaacatttaaaaattaactgggcatggtggtgtgtgcctgtggtcccagctacttgggaggctgaggtgggagaatcacttgagcccaggaggttgaggttacagtgagctatggtggtgccactgcactacagcctggtgacagagagaaaccctgtctcaaaaaaaaaattacacttaggctggatgtagtggctcatacctgtaatcccagcactttgggaggccacagtgggtggatcacctgagatcaggagttggagaccagcctgggcaacatggtgaaacctcgtctctagtaaaaatacaaaaaaaaattatttgggcgtggtgtcacatgcctgtaatcccagttactggggaggctgaggcaggagaatggcttgaacttaagaggcagaggttgcagtgagccgagattgcaccactgcactccagtctgggcaacagagtgagactgtctcaaaaattacacttaaaagtgtaataggctgggcacagtggctcatgcctgtaatcccagcactttgggaggctgaggtgagcagatcacttgaggtcaggagtttgagaacaacctggccaacatggtgaaaccccatctctagtaaaaatacaaaaattagctgggtgtggtggcaggtgcctgtaatcccagctactcgggaggctgaggcaggagaatcgctccaacccgggaggtggaggttgcagtgagccaagatcgtgccactgcactccagtctgggtgacagggcgagactccatctcaggaaaaaaaaaaaaaaagtgtaatacttaaaagaagtaatacgcataagtgataccaaatccaaaagtttcaaaggacatagagtacaaagtcattgtccccaccttgcctgtctcggacgccaccagatctcgcccgcagagtcactttctggaagagatctgacaaatcttcattttatatacatatatatatatatatatatatatgtatgtatattttcttcttctttttcttcttcggcatccattttgaagcacaaggcccactgttccatatcttgctcttctacttaataactgcctcgtagatactttcttattagcaacatagagagaattggcatactgtttttgttttgtttcttattgaggtataatttacatacaataaactacgcccattttaaatctacagtttgctgaattttgacaaatgtatacacccatataatgacaactgcaattaaaatggaactttctcatcagcccacagcatttactcttgtgcctttttgtagttaagccccaccagcctcgtgaaattacagacctgctgtatctgattctagattagttttgctttttccagaactttagataactggaatcacatagtcggtactcttttatgtctggcttctttctttcctttttctttattgttcttttgtttatttatttactttgagtcggagtttcactctgtcgccaaggcgacactgagcagtggtgcaattttggctcactgcaacctctgcctcccgagttcaagcgactctcgtgcctcccgagtggctgggattacaggcgtgcatcaacgcttggctaatttttgtattattagtagagacagggcttcatcatgttggccagactggtcttgaactcctgagctcaggtgattcgcccgtctcggtgtcccaaagcgttgggattacaggcgtgatccgccgcgcccggctttcttttttctttatgctctaaaatctatcactggccaggcctagtggctcacacctataatcccagcactttggtaagtcgaggcaggactatctcttgagcccgggaatgtgagaccagcctgggcaacacagtgagactcccatcactacaaaaaatacaaaatttgtaaaataaataaattttaaaaatgtatcactgtattgcctggcttctttcattcatcacaatgtgtttgagagtcatctgtgttttgtatgtacccatagatcattcctgggctgggcgtggtggctcacacctgtaatctaacactttgggaggccgaggcgggaggattgcttgagctcaggagttcgagaccagcctgggcaacatgaggagactccctgtctctacaaaaaaatacaaaaattagttgggcttggtggtgtgtgtttgtggtcccagctacttgggaggctgaagcaggaggatcgtttgagcccaggagatggaggttgcattaagccgagatcgtgcccctggacttcagcctgggagacagagccagaccctgtctcaaaaaaaaaaaaaaaaaaaaaaaaaaaggtgattcctctccttgctgaagtgtgctccattgtggccattccagttagtttatgcacccactcgttgctgggcactcgggttcccctcagtttgcagctgttatgaaaaagtaccgtgaccaggtctctgtgtggacaatgttttcatttcccttggctaactacttcagagcagggtcactgtgtcgtaggttgtgcatattttttgttttataagaaattgtcggccaggtgcaggagctcatgcctgtaatcccaacactttgggaggccggggcgggtggatcacaagatcaggagttcaagaccagcctggccaatatggtgaaacctcatctctactaaaaatacaaaaaaattagctgggtgtggtggtgcatgcctgtaatctcagctactcaggaggctgaggcaggagaatcgcttgaacctgggagtcgggaagttacagtgagccaagatcacgccactgcactctagcctgggcgacagagcaagactctgtctaaaaaaaagaaaaaaaagaaaagaaattgtgcaatccttttccaacgtggtcataccactgctcgtgctttctgtacttcgtgatatatgagacgtggctttggggaagagggactgtgttggtcacccaggctttgacgtatttgggaaatagcctgtcggggctgaacccccatattagggactttaccatccccctgctggagagagggggacgtttgggacttattgttagaatgcacttggaggccgggtgcagtgtggttcacccctgtcatcccagcactttgggaggccgaggctgcagtgagctgtgatcagcatcactgcactccagcctgggcaacagggaaagatcctaactcaaataataataataataataataataataataataataatgcacttggctttgcagggcccagctgtggccctggatcccttggattgaagtaaaagggtttctcatagattctggggcccatcacaattactgaagccggctccttggaaataaatgcacatttctcagaggctccctgggtgaatctgacagaacctgccctaaagtttgggaaccgctgagtttgggaaccacaaaagccctgagatgcaagagaacaggtcctggaggcagagaccagaaacccaggaccttggatgctggccaaagagatgggatttttctcctgagggcactggggagtcatggagggcttaactgggggagtgacacagttcaggctttagtccaacccctgtggctgtcatgtgtatgggtgtgtgtggaacagatgtgagcgaggcacccagaaaggagatcatgtgaaaaccacagccagggtaggggtaggcaggaggggatgtcaatctctacagactctagttttctttattttcctttattatttttttttcaattctttttattttttattttttgagacagaatctctctctgttgcccaggctggagtgcagtggtgccatcttgactcactgcaacctccacctccccagttcaagtgattatcctcagtagctgggattacaggcatgtaccaccatgcctggttaatttttggtatttttagtagagattgtatttttagtttcaccatgttggccagactggtctcaaactcctgacctcaagtgatctgcccacctcagcctcccagagttctgggattacaggtgtgagccaccgagcccggcctattattattgttttttgagacagggtctcgctccatcacccaggctgcagtgcagtggcggcgccatctcagatcactgcaacctccacctcccaggctcaaacaatcctcctgcctcatcctcccaagtagctgggactacaggcatgtgccaccacgcctggctaacgaggtctcaccacgttgcccaggctggtatccaactcctaggctcaagtgatctgcccgcctcagcttcccaaagtgctgagattacaggcacaagccaccgcatccagccactctacagactcctggctgcccttctgtcctagtctcctccggctcccagccactccctgccctggattctgacctgggcacagctctgactacactcaccagacacccctccttctccttctcctcctcccccatggcgatgacaggtctcaggcagggagggtgggcagccaggacaagggcgtgggtttgtgtgcgtgtggtggtggtgggagtgtctggtcgtgcgtgtgttgtgagctctgccagtgtttgcctgggaatctgctggggacttccaggtgcagtatttgttgatctgctccctcccctggtttttccccacccgctgggcactggttaattcccaactttccagggcagtcacttcacctctcttgcctcagttccctgatctgtcaatagagatacaattaccagttcccaactctgcagggttgtgaggttcaaagagtccaagactcaataaatgtaaccatcatctcctgcttgcttctgtatgagcccatgtttcttcccaggggcgatttgttttttgttttgttttgtttttgagatggagtcttgctctgttgcccagcctggagtgcagtggcacgatctcagttcactgcaacctctgcctcctggattcaagcgattctccggcctcagcctcccgagtagctgggactacaggcacgcaccaccatgcccagctaattttttttttttttgtatttttttttttttttagtagagatgggggtttcaccatgttagccaggctggtcttgaactcctgacctcaagtgatccgcctgccttggcctcccaaagtgctaagattacaggtgtgagccactgcgcctggcctgtttttgttttttgtttctttgagacaggatctcattctgtcacccaggctaaaatgcagtgatgcgatctcaggtcactgcaactttgacctcctgggctcaagcgatcctcccacctcagcctcttgagtagctgggaccacaggtgtgttccaccaaactgagataatttattaatttttttgtagagatggggtcttgccatgttgcccaggctggtctcaaactcgtgggttcaagtgatcttcctgcctcagcctcccaaagtgttagattaccggtgtgagccaccacactcagcccttgggggcaatttgaatctgtgtccctgtgtatgttctctaagattctgtatgcgagtgtgtctaactcgttgtgtaccagctgtgcaaccttgggtgagttactagacctctctgtgcctagtttcttcatctgctaaatgcacatgacttcctagtcatgctacttcctagggtggatgtggagactgaattaattgcctaattaattacctaagtccattgcaactaatggacttagtgcaatgcctggcatgagggcagcctcaattacatgatcattatcactggggcgtgacttctgtcccccacccgctgagtgtctgtgagtgtctgagcgttggggcaggaagtgcctgtgaaagcatgtggagttatctgggactatatgggacccagcctgggaaggcagcttctgtttccatggcacccctcacagggttgttgtattggaaagacccgtcccagagggcatccgccagcacacagctgcacacacatgtttgctgttacttttcctttacctataaaatgccagtcatagtagcacccaccttgtctttgtaggagaatgaaatgaacttagaggcgctcagtagaaagcactcacgcctgtaatcccagcactttgggaggccaaggcaggtggatcacttgaggtcaggagtttgagaccagtctgatcaagagggtgaaacctcgtctcttctaaaactacaaaattagctgggtgtggtggcacatgcctgtaatcccagctactcgggaggctgaggcaggagaatcacttcaacccgggaggcggaggttgcagtgagctgagatcgtgcttctgcacttcagcctgggtgacagagtgagactccatcagagagagagagagagagagaagcaagcgctcagtgctgagcttacctgggccaggtagagggatgtggccacgggcaggaagtggctgtgggaatctggcgctacaggttcctctgccaccccacttcctccacacctgacctcctgtccccacctgtgccccgtcccttgctcccacctcctcgtgacctctgatgggggaggcttctgcagccccccaccccagtcccaggcaggggtgcaggcccccagaacacccagttgggatcactgcttccctctcactgccatctttgtgcctccctggggtcccccatctctgaggctcctcatctctggttttgggtgtctctctgctctcctcaccttggttttctggacagtatgtgtcagggccccaagggggtgtcccaggtgaggacagagaaggaagtggcagaggcaggaccttccctttgcacctcagctcatccatccactccccctctgcagagtggggagggggaggaggggggtcttcgttaattagcctcttaatcctgccatgctggatcttaatgaggtgcacgggtcccattagacagcccggagccctggcattagcacattagtcacacgctctgtcaggctcacgctgggtcctcagctggccctgggaaaattggggcaggaagtctggggacctaaggagggggctggtgcctggacttctgggtctgaagaaggaggggctggtgcctggactcctggatctgagggaggacggactgggggcctggattcctgggtctgcgggaagaggggctggtgcctggactcctgggtctgagggaggaggggctggggtcttgaattcctgggtctgagggaggaggggctaggggcctggactcctgggtctgagggaggaggggctggggtcttgaattcctgggtctgagggaggaggggctaggggcctggactcctgggtctgagggaggagggtccgagggacaagatcctcccccgacacgcccctctcttaaatgtcagccagggtgccctgccccttcccgctcccagttaaccccagccctgtgaaaccgggacagtcgcgcagcctcgagggatggaggaggtgcgtgagggacacgcgctcggtggcgggatggaagccgatgggcccgcgagcctccaggagctgcctccctcgccacggtcgccttcaccgccgccgtcgccgccaccactgccctcgccgccgtcgctgccatcgcccgcagccccggaggcccccgagctccccgagccggcgcagccgtccgaggctcacgcccggcagctgctgctggaggagtgggggccgctgagcgggggcctggagctgccccagcgcctcacctggaagctgctcctgttgcggcggccgctctaccgcaacctgctgcgctcgcccaaccccgaaggtgcgcaagggcccagagcagccaggaggcaccaccctgaccgtctgtctcttcctctttccctgtttccttatctctctacctctttgtctctctctgtctatgcatttctctgcatccctctgtctctttttctgtcattgtgcctctccattttaccacctgtctctctgtcatgtctcttacctacctctctcacacctctccctcacacctctccatctctctttctctctcctcctctctctctccccctctgcctatgtttctgtctcttgagacggagtcttgctgtcgcccaggctggaatgcagtggtgcaatctcagctcactgcaacctccgcctcccaggctcaggcaattctcctgcctcagtctcccgagtagctgggattacaggcatgcaccaccatgcctggctaatttttgtatttttagtagacacagggtttcgtcatgttggccaggctgggctggtttcaaactcttggcctgtctctttctctgggttcttctctctgtccctctgtctctgtctgtctcaccacaccccacttacccctggcattgccctctccccagcccagagccctgactcactcatccctgccgggcttccctgacctggcacagattcctgcccttccagtgtatagccctgcgggtagggaggggtgaggcggtggaagatggaggggctgcccagaggctccactcacctgtccatttcaggcatcaacatttatgagccagcaccccctactggtcccacccagcgacccctggaaactctgggtaagtgcttggagggccaggttgctgagggtggggagggtcctccagcgttggggtgtcctaaccctttgctccccaacctgcaggcaatttccgtggctggtacattagaactgaaaagctccagcagaaccaaaggtgagtcgccagggccagtgtggcttacactccattccctgctccacccttcctcactgtgagacctggagaaactgacttggcctctctggacctccatttcctgctctgtaaacagggttagcataagagagaatgcttgtaaaacacacagcatagggcccggccaggtctggctagcaccagtcaatagcagctattattggtttttggtttttgtttttaagatgaagtctcactctgttgcccagactggagtgcagtgacgcaatctcagctcactgcaacctctgcctcccaggttcatgcaattctcctgcctcagcctcctgagtagctaggattataggtgtgcgccatcatgcccagctcattttgtatttttagtagagacggagtttcaccatgttggccaggctggtctcgaactcctcacctcaagtgatctgcctgcctcagcctcccaaagtgctcagattacaggcatgagccaccgcgcctggctattcttgttattgttgtaattattctaaggctctttccctgggaggggaagagtcaccccaggcccctgtcctccatgaaacagagccttgctcctgcacagtagatgagctggtgtgacttggaggctcagggtcacacaggccagggttgggatcctggctctgccacatgtttgctgcttgaccttggacacgtctccatcctcagcctcaggttccttgtctgtagcatggggttcaggatgcattgccctcagaggggcccgtgggaactgagagtggaaggtgctgagggagcaccccacgtgtggggacccaagctatccctaagaaagcactaagacagggcttcctgctccctggatcctggcagatcgcagaccccgcctctcccggcccttctttcacagctggacagtgaagcagcagtgtgtggaccttctggccgagggcctgtgggaggagctgctggatgacgaacaaccagccattacggtcatggactggtgcgtgcccctcccctgccagcctgaccccgtgatcgcgcagggctgcccagagcatgagccttactctgagctccccttgctttcagcccttcaccaagaccctcctggtgctacagggtcctgccctgcccacctccctggccccttctgtttgagcctttcagattttgaaatgtgccagggggttactgaggctgatctttatttctttttcttttcttttttttttcttttttctttcttttttttttttttttttttttttgagacagctgactctgtcgcccatgctggactgcagtggtgccatctcagctcactgctacctctgcctcgcaggttcaagcgattctcctgcctcagcttcccaagtaactgggactacaggcgcgcgccaccatacctggctaatttctgtatttttagtagcgatggggtttcaccatgttgcccaggctggtctcgaactcctgacatcaagtgatctgcctgccttggcctcccaaagtgctgggattacaggtgtgagccactgtgcccagcctattccttatttcttaaaagcctgtcaccctctattctcaagaccaattccttcttattccttaggagtcacttccacatggctgcaccaggaagccctccctgatcacccctcagctgggtcacgtgcattttctccagtgccctgtgcctccaattccagccccaacccctctgcctgggtccccaattccgaccccaacccctctgcctgtgtccccagttctgtccccaactcctctgcctgggtccccccatcctggccctgacccctctgcccgtgctccccatcccaaacctggccgttcctggctgtcatgtttggtggcatgcctgcctccctcactggactgtgaatcccatgtggcagggtgtggggctgtcttggtcactgctatgttgccagcaccacccagctcagggctgtgtacagcatgggtagcagcatgtgtgttgaatggggaatggggccaggggctggggctgggtagctgagactgcagtgacagctgaaggccttgactccgcctgcaggttcgaggacagccggctggatgcgtgcgtctatgagctgcatgtctggctgctggcggccgaccgccgcacggtcattgctcagcaccacgtggccccccgaacttctgggagaggaccccctggccgctgggtccaggtgagactctccgcgccggggccctcaaccccagacgtgtgttcttgtcccaagacctcacagagggaggagaacaggtccgcgggtcctcaaaaagggctcctccctaaccccaggtgctgtcaccacaggtgtcccacgtattccgccattatggtcccggtgtgcgctttatccacttcctgcacaaggccaagaaccgcatggagcctggtgggctgcggcggacacgggtgaccgactcctccgtgtctgtgcagctccgggagtgactggctggctcctctgtcctgaccccacagcacctccctgacctttaggagccccaactcttagtcacctcctaggcctcttatttctccctggcccttggcttctcacttgatggacagcttcacacacccttaagcggtggactccagcattttcccagcactgtctgagccccatgagggcggagccactccttgtaaattcagtgcccgacagatgctctggcacagatgctttgtagatctctgttgagagaatgcatagacacctgtgcccaaggatgctgagggctggtctctgcttctttgaacttcactgaaactgaatgctcactgctgtgttgccagcaccacccagcccagggctgtgaacggagtgggtggcagcaaatgtgtgttgaaaggggaatgaagccattcacttcactcagttcctgtcccatttaaccgccccgatccttgatcttccattaccttcacatcccggggtccttctgaactgaccttgacctctgatctcttcacacatctccccttagcatctccacttacctacttttttttttttttttgagatggcatctcactctgtcacccaggctggagtgtagtgacacgatctcgactcactgcaatttccacctctcaggttcaagtggttctcctgcctcagcctctcaagtagctgggattacaggtgcacagcacctcccccgactaatttttatatttttagtagagacgggatttcgccatgttggccaggctggtctcaaactcctgacctcaagtgatctgcccaccttggcttcccaaagtgctgggattgcagacgtgagtcactgcgcccagccattccatgtctcttaagtctcagaatctcccctagctccctccaggtgtctgcagtggttgtcccctcaaagctgtcccacaccctcctccgaggaccctttgtgtatctcctccagctaccgcagagcccacaaacccaggcatctatcaaagtccctcattcatgagggtggtgaggacacagactgcgaccagaacagaaatatgaaaatgtgaatgacagcgtcccccgtgtgtggaatgtggggattaaaagcatttatcaacctctaagtcctgatctgatcacttgcagatcctagccctagtgcagggctgggtactagaaggccccctgctgtcccctgcaggaaccatggagggagtccggaggcccctggaggccagaaacggctcaaggaagagtgtttgtttgtttgttttgagacagagtgctccctctgttgcccaggctggagtgcagtggcacgatctcggctcactgcaacctccacctcccaggttcaagcgatttctggctaatgtttgtggggtttttttgtttgtttgtttgtttgttttgttttgagatgaagtctcgctctgtcacatgatctcggctcactgccagctccgcctccaggttcaagccattctcccgcctcagcctcccgagtagctgggactacaggcgcccaccaccacgcctggctaatttttttgtatttttagtagatacggggtttcactgtgttacccaggatggtctcaatctcctgacctcgtgatccgcctgcctcggcctcccaaagtgctgggattacaggcgtgagccaccgcaccccgccctaatgtttgtatttttagtagagacggggtttcaccatgtttgccaggctggccttgaactcctgacctcaggtgatccgcccacctcagcctcccaaagtgctaggattacaggcctgagccaccacaccagggctaaggaagggctattactgaaaaggatggggcatgtttcatatttaacaatcagcccaaggttcccctgcagttcactcacatgtccttctgtgggcgtgtgtcttcgtgcacacctaaaaccatgtccgagtcgatggcgtgtccttatccatggcattgtcctgggtatgggctgacccaggcccaaccaccctgctgtctcctccatcccacccggtccttgcatcccagggacaagcagatgacagacggggacaactgcacaaaggctgtattgcaggggaggtgggagggggcaggcagaacgctcctcctcctgggtcttggggccccggagcagagcccagggatgggctgagtgaggggcttggcactctgtggaagctgcagatgagagaccagcaatgcatcagctgcacctgaaatgtaatcaagaattccttccaggggctctcagagacccagagtctggtgagttctagaagcctgagactgggtgggggctggggagtctgggtctgaggctccaagttcaggaaccagggatcctagcctgggagtttggagctgggggctccttggagctcttgggggacaggagtggctggggagggtttgggagggtgtcaccgctggatctaggtcccaggtctgtgagtgcaaggtggcctcagggacctccagggttgggtcttgggggtgggctgtgggactgattttagggctgaggctggtctggagggtctaggggagtggagagcatgaaggctacactgggtgttcctataatcgagtctggagtcttgaggtctgggttagttttggagtctgggagctttgagatgtgatgatctggggagtgggggctggctttggttctggggactccagggtgagggggtctaggagctctcagtccccagaattagccagccctctctgggaagtacagctgtgggcgggtgggtaggcggaagattccagaaggtggagggttggctctgaatctcagagctggggcggaaatctccgtcccaggggcctgggctgcaggtggagtggggaccgggtgctgggggtgaggagaaggaggacctggtttgggtgaggactctgagatgggggcctccaggactggttctagggaggcctggtgctccctgttacagtcgggagctcaggggtgtggagcagcctcggggcttgggtggtgggtgtgggggcttatgcggagctggggcctgggcctggggtgggctcggagctttgggcggccgggcacctgcagtagagcgcggagatagcgttggaccagtctcctaagatgccccggcggtactcctccaggcgcgggtaggtgccggcagagaacttgtgcgtcttgcccgccttgccttgccgggaccacacggtgagctcgcagcgcggggccaccacaagtgaggaggcggtgttggcccagttggagggcaggtagggcaggtctgcgcccgactccagcgacagctcggcgcccccgcagcagttctcatagtaggggtcgctcttgtcatagagcttggcgcaagtgcgcgtcccgtccgagtgcttgaggtcggcggaggcggggcaggcgccctgggcgcaaggcacggaggcaagggccagggccagcagcagcgggcgcagcggggacatggtggcagtgccctgccgcagccccgcgcgcttttatgcgcccgacccgtgggaagggacaagctgcgagataaggactcatcgagggaaggggagggcgcccctccctcaggagccgggagacctgcctaacctaggtcggaagcccacaaccctgagtacaaggtggacgctgtgtatacaacttagcaccttaagatgttaggtgaccaacaacattataaagagagacaatagacagaacttgaggaggagtcatttgcaacacagagggtggcataggttaatagacagaaatgggaagagctcttaaaaattgacaaggggcttgctggttgctcacgcctgtaatcccagcactttgggaggcctagacgggtggatcgcttgggcccaggagtttgagaccagtctgggcaacatagcaagatcccatccctactgaaaaataaaattagctcagcgtggtggcatggcctgtagtcccatctactcacaaagcagaggcggaaggatcgcttgagcccgggagttcgaggctgcagtgagccgagatcgtttcactgcactccagcctgggcaacaaagacaggaaaaaaaagataaggaatggaacaacccttattctaaataaggaaagactgggagggggaggcaggagtgggaggctggggcctcctggctgggcaggctccctccctgggaggcaggaccttgggaaaggagaagctggagataaggatagaggccctcgtggtggggcgggggggggcaggtagagaaggagatggggaggagcccaacgccccaccccccacccccaccaggctcagactgggcaatcttcccaaccaaggctggcaatccagaatctgtgaagtacaagatagcagtatttgcataacacgttaaaaaccttttgcaagacagtgtacaaaggcttgaggagatatttgcaacatttcaaaagcatagcattgcaagctataatatataaagagtgcacacaggttgggcgcggtgactcacgcctgtaatcacaatactttgggagactgaggcaggtggatcatttgaggccaggagttcgagaccagcctggccaacatgatgaaaccccgtctctacttaaagtacaaaaattagccaggcgtggtggcacatgcctgtagtcccagctactcgggaggctgagggatgagaatcacttgaacccagaaggtggaagttgcagtgagccgagatcgcgtcaaaaaaaaagagtgcatacaaattgacaagaaatgcactcctccctcccacatgctaaggacaggcctaggagagggagagggagggaacagcctgcaactcccaccccaggagccaggagactttcttaactaaggttggaaatcttcaatctataaaacttcaatcttgttttatagattttgagctgtataaaactgtaaaaactgtcatatagcaaaaacaaaacaaaacccacaaacccatccagggaaaaatagactcaattcctatcatataaaatgagctcttaccaatcagccaatagaaatgaaacaagggccgggagcagtggctcacgcctgtagtcccagcactttggaaggcccaggtgagtggatcacttgaggtcaggagttcgagacccgcctggccaacatagtgaaaccctgtctctactaaaaatacaaaagttagctgggcacggtgacacacagagcctcgggaagctgaggcaggagaattgcttgaaccgaggaggcagaggttgcagtgagccgagatcacaccattgcactccagtctgggtgacagagtgattctgtcaaaaaaaaaaaaaaaaaaaaagagagaaagagaaaagaaacaagcaaaggaaaaattagagcagtataggaaggagagggagattggaaccctcgggctgaacagggacccggacctctgggagcctggccaaagcccttccaaggttctttggagttcccagcctcttcccaaaacagggtcaagtgtgtggatgcgctgattagagagacaagggtccactggctctgtcagtacaggtgtgggccttggtttcctcatctgtgaaatgggtaatgtttcctcctacgccatacgaatgttgaaaaggttgcaggagatggtagaagggatgtggtttaggaggacagtccatggagtcaaactgcctgggtccaaatcccagctcctctacaagctgtgcacatgaaggcctcagggacacgctgatggtacctacctcagagtgctggtataaggaataaattaattgggctgggcgcagaggctcaccgcctgtaatcccagcactttgggaggccaaggcaggaggatcacttgaggtcaggagttcaagatcagcctggccaacatggcaaagccccatctctactaaaaatacaaaacttatccggtcgtggtggcaggtgcctgtaatcccagctacttgggaggctgaagcagaagaattgcttaaacctgggaggccgaggctgcaatgaactgagatcgtgccattgcattccagcctgggtgatagagtgagaccctgccaaaaaaaaaaaaaaaaggaataaatgaattaatccacataacagcacttagagaagggatcggcctttgctaagtgccatatgagcatttgccatcatcatcaccaccatcttttttttttttttttaagagatagtctcactccgtctcccaggtctgcagcctcaacctcctgggcttaagcaatcctcccacctcagcttcccaagtagagaacatgccaccacaggcccgcaccaccacactctgctaattttttggttttttttgtagagatggggtttcaccatgttgcccaggctggtctcgaactcttgggctcaatcggtcctcctgcctcccacagtgctgggatcacaggtatgagccactgcacccggtgcatcattattattattaaaacctttagcacagtgcctggcacatagtaaggactcaataaacctcaaccatcacaacaacataacaccaacaatttgctgttatccacagtcactcagctaaacctatgccctgctggtcctccttagatgctgtggcttccacctcgggtggggtagggctgttgtagagagccaaagactggaaacacttggaagtgggttcggatgtttactctgccacctgcttgctgagcaaccttgggaaaatgaacttacctctctgagcttcagtttcctcctaccttcaatgggataatagaaaatgaggtctcatgagccaggcatgatggcacatgcccatagtcccagttacttaggaggccaaggcaggaggatcacttgagtccaggaggtcgaggctgcattgagctgtgattgcatcactgtgctccagcctgggcaatagacggaaaccctgtctcaaaaaaaaaaaaaaaaaaaaaaaagacgtctctataaagtaatttacaactgatataatacattatgaacaatccatataattgttatttataaatataatataggctgggcacggtggttcatgcctgtaatcctggcactctgggaggccgaggcgggaggatcacttgaggtcaggagttccgagaccagcctggccaacatggtgaaaccctgtctctactaaaaaaatacaaaaattagctgggcgcggtggcacatgcctgtaatcccagctactcaggaggctgaggaaggagaatcgcttgatcctgggaggcggaggttgtagtgagccaagatcgtgccattgcactccagcctgggtgacagagtgagactctgtctccagaaaaaaaaaaagaaagaaaaaaagaaatatatatacatacatatatatgtatatgtatgtaatatgaatacttaatatacaatattgcattaacacaatagtataaatgcaaatacataaagcatgaagtacagtgcccaacacatgataggtactcaatacatgggagctactatgactgttctcctaacagctctgagaccctggccattggcctggccctgcccagggatccttctttctcatttccttttgtgatcccttgaaatctaatctccagctgctgacttcccagagagcctccttggtcccaggggcacagaacacccaccctctggctctgcaccgccccagacacagggatggaggacagcagagtcacttagagtcctgcccaccccggagggccatgaacttcagacacagagagcgacatggctagggagaccctgacagggagacagacacaggcacaggaaggaacacggaaaccactgaggcacagtacacagcccgtgtctgacagagcccacagagacccagggcctgggcacagcattttcaatcccgcctcacacacgggcagggagtagggacacgcatcacacagccagccactgatggtcctggattctcactggtgaatcctaaggtagacacatgcacagatctggggcaacacgtacccctgtcccccaacggaaccacacacagccattgtcacaaacaagcctccagtcttcctccactcccgccctacactctacaaatctcacaatctcacacctgtgaaatcttttttttttttttgagacagagttccgctctcgttgcccaggctgctgcagtgcaatggtgcgatctcagctcactgcaacctctgcctcccgggttcaagcgattctcctgcctcagcctttcaagtagctgggattacaggtgcccgccaccatgcccagctaattttttgtatttttaatagagacagggttttgccatgttggccaggctggtctcaaactcctgacctcaggtgatccacccacctctgcctcccaaagtgctgggattacaggcgtgagccaccgcgcccggcctctttttttttttttttttttttttacattgtcggggtctcgatctgttggctagactggtctcaaaatcctggcctcaagcaatcctcccacctgagcctcccaaagtgctgggattataggcatgagccaccacacatcatgtgaaatctcacacacacacatctgacttgttcacataagcacacgtcacacacacacacacacacacacacacacacacaggcgcacagcgtcctcatccagaaacaatttcctcagtatttattaacacaaactagacaaatggtagaaaagcgaacatcttattacacaattttttctaataggagaatgtcctgcccttgaggaaccatgagcccttgagaatgtcagatggtaaataaatcaataattcgaacacaacgtgaaaagagttagaacaggggcatacaaaggaatgcaatgggaagaatgacaggttggtttgtttgtttcatatccactgatatattttggtttgtataataaggaatcctcttttcaggttttacaaccttgatttgacatttttcagcacagcataaaaagagagattgcttatacatgtgaaattgccactagaagaaaaacggaagtatttgtctccatcagggtggtacttgaacataaacaacattataggttgtacataatttaaatgaaaatgctgtgtgttgcataaatacaggaaaatactcagatcggtacttaagttcatactgggtcatcagaatgcattacaattttgtaaagatatgacactgaatgacattttctttctttttttgagacagggtcttgctctgttgtccaggctggagtacagtggtgcgatcacagctcactgcagcctcaaactcctggcctcaagcaatcttcctgcctcagcctcctgagtagctgggaccacaggtacacaccaccaagcccagctattttttttttttttttttgagtggagtctcgctctgttgcccaggctggagtgcagtggcacgatctcagctcactgcaagctccacctcccaggttcacgccattctcctgcctcagcctcccaagtagctgagactacaggcgcccgccaccacacccggctaattttttgtatttttagcagagatggggtttcaccgtgttagccaggatggtctcgatctcctgacctcatgatctgcctgcctcggcctcccaaagtgctggaattacaggcgtgagccaccgtgcccggccggcccagctaattaaaaaaaaattttttttttttttagagataaggtcttgctatgttgcccaggctggtctctagctcctgggcccaagcgatcctcctgctttggcctcccaatgtgttggggttacaggtatgaaccactgcacccagccagattatttccatataattctttttttttttttttttgagatggagtcttgcacttgtcacccaggctggagtgcagtggcgcgatctcggctcactgcaagctccgcctcctgggttcacgccattctcctgcctcagcctcccgagtagctgggactacaggtgcctgctaccacgcccagctaattattttgtatttttagtagagatggggttttaccctgttagccaggatggtctggatctcctgaccttgtgatctgcccgcttcggcctcccaaagtgctgggattacaggcgtgagtcaccacacctggctatttccatataattcttaagggatagtataatcccaaagcagccgtaactgtgtggtttggagacagtggttctcaaagggtactccctggaccaacagcatcagcatcctgtcagaacttgctagaagttaaaattctcacccccaccccagccctactctgggatggggccttgcaatctgggttttcacaagccctcctggttactccagtgcacactcaagtttaagaactgatggctagggcttcagtctgaggcttcctatgtcacgaatggtttattatacctagaattttcttctctttttctttttctttttttttttttttgagacggagttttgctttgttgcccaggctggagtgcagtgtcatgatcttggctcactgcaacctctgcctcctaggttcaagtgattctcctgccacagcctctcaaatggctgggattacagacacacgccaccatgcccggctaatttttgcatttttagtagagacggggtttcaccacgttggccaggctgctctcgaactcctgacctcaagcgatctgcctgcctcggcctcccaaagtgctgagattacaggcatgagccaccacgcccagcctacgtctagaattttctgtattgatacttcaatttgtttagatcctttaaaagtatatttcatgtaattctcctgattacagaaaaatattgtcattagcaattagaaaagggaacatctccagtgcctggagctccaaatgcccagactgaacttgaatctcctgcaacacagacaaaagattggtcatcagctaacctcaggacacagctcacctccattttctcagatacacctatggcaggtgaggtgccttgtcttaaaggttcccggggtcccacagtccctttctggtctaggccagagctactcaacttttaaggtgctgccaacctcctagagggagagggagagggagacgggaaaggtcttaagctacagattctgcttcaacaggtttgggcttgggtttaggtcctgaatttccttttttttttttttttttttgacagagtcttgctctgtcgcccaggctggggcacactgtagacaggatttcaccatgttggccaggctgatctcgaactcttgacctcaagcgatccacccgcctcggcctcccaaagcgctgggattacaggcgtgagtcactgcgcccggctgggtttaggtctgaatttcctgcaagttcccagagcatgccaggctgctgagggccattgcttgagtggcgaggctctctgcaaactgacagtctaagctgagacagataatgcaagaatacagcccaaatttggaacctgccaccaggaggaggtggcaggaatacagagggaagccaggcccagagaactcagggaagcgatggagatggaaactcagattaaattctgaaggaagccggtgaaggaagctggatctgaaactcttcagggctgcaatagcgttggtccaggagcccctgcgggtggggagtgaaaaccctaagccaagcccagattggggacagggtttcgctggtagcagggcccgggaagggggaacccagaagcgctcaggaggtggcgccatagcacagagattgagtgggtccaggactgtgggttcaaatcctgcctctgccttttatgggctgtgtgagtttgagcaacttactcagcctctctaagcttcagtttccctcatgcatgaagtggacacaatacacacacaaaaactgcttacgtgttcttagagttttgagatttgtagggaggtttcctgtttcttattgcttaatattggtcatcgatacattctgtctcgctctctcttattttttaaaatgttattaatttttatcaggcactctctgagccagagtagtctcagagactccctcattttttcttttcttttttttttttttttttttttttttttgagatagagtctcgctctgtcacccagattagagtgcaatggtgcaatcttggcttactgcgacctccgcctcccaggttcaagcaattctcctgcctcagcctcctgagtagctgggactataggtgcactccacgatgcccggcttattttttgtatttttagtagagacgaggtttcaccatgttggccaggctggtctcaaactcctgaccacaggtgatccaccggcctcagcctcacaaagtgctgggattacaggtgtgagccaccacgcctgacctcattttttctctatcagttttgatttataattgcaaaacttttttttttttagatggagttttgctcttgttgctcaggctggagtgcagtggtgcaatctcggctcactgcaacctctgcctcctgggtttaagtgattctcgtgcctcagccccctgagtagctggtattacaggcacccgccaccacacctggctaacttttgtatttttagtagaaacagggtttcaccatgttggccaggggctgatctcgagctcctgacctcaagtgatccacccgcctcagcctcccaaagtactgagattacaggcatgagccaccgcatctggccttataattgcaacatctttattagactcttcgccaatgataactaacagttggctttgtgggttcgggttctcctattgtacatttgtttctttaatttgatcttatttcattaatgataaatagcattagttaccattgtggatttggttattataccttttttttgtttgtttgttttgagttaaggtgttgctctgtcacccaggctggagtgcagtggtatgatcacagctaattgcagcctcaacctcctgggttcaagcaatcctcctgcctcagcctccagagtatctgagaatgtgccaccatacccagctatttttttttttttttagtacagctgggtctcactctgttgcccaggctgttcttgaactcttgggcccaagcaatcctcctgtctcagccttcccagtagctgggactatgggtgcatgccaccatgcccagctaatattttttctttttgtagagatgggatcactcactgtgttgccaagctgctttcaatctcctgggctcaagtgatcctcctgcctcggcctgctaaagcactgggatttcaggggtgaagcgctgctcccagcctattatatctttcatgcttgctttctttattcttttttcctttgagttttttgtttgtttgtttgtttgtttgtttttgaaacggggtctcgctctgtcatccaagctggagtgcagtggtgcgatctcagctcactgcaacctccgcctcccaagttcaagggattctcctgcctcagcctcccaagtagctgggactacaggcatgtgccaccatgcccagctaattttttgtagttttagtagagatggggtttcaccatgttgcccaggctggtcttgaactcctgacttcaagtgatccacccaccttggcctcccaaagtgctgggattacaggcatgagccaccatgcctggcccttttctttgagttttgcgtgctgttcttttcctcacatttaagatagatggttagctggcttattttcagcctcgttccttttcccacatttgtatttaaggctttacactttttttgtgggattgttgtgtgtcttacataagcaaaaagtatagtgggttgaggttatttcaggcacatggaaagtgctcagtgtgtttactgacatggatgatggttttgattattatttaatttatttatttattttgagacagagtcacactctgttgcccaggctggagtgcggtggcgcgatctcacctcactgcaacctccacctcccgggttcaagcaattctcctgcctcagcctcctgagtagctgaaattataggtgtgcactaccacacctggctaatttttgtattttttaaaatagagatggggtttccctatattggccaaggtggtcccgagctcctgatgttaggtgatccacctgcctcaacttcccaaagtgtgattattattattcttattaatcaggagctttagagtcagagaaagattcaagcaagaagtttggattaattatgaatcagtttcctattgctgccgtaacaaatgattgcaaacagtgctttacaacaacacagattcattatctcacagtcctggaggttggaagtccaaaatgagtctcctttggctaaaatcaaggtgtcatcgggctgccttccttctggaggctccaggggagaatcctgtttcttgcattttccagattctagaggccacttgcattccttagcttgtggccccttccttgttgaagtcagcaacagagaatctttaaatccctctatgactctgtccttttctgctgcctgctcttccactttaagggatccttacaattactctggtcctacccacataatccaggataatttcctttgttgttgttgttttttgttttaaagacacggagtcttactctgttgcccaggctggagggcagtggtgtgatcaccactcactgcagtcttgattacccaggctcaagcaatcctcctgcctcagctgcctgagtagccgggactacaggtatgcaccaccacacctggctaatttttgcatatttttgtagaaacagaatcttgctatgttgcccaggctggtctcaaactcctgggctcaagtgatcctccagcctcagcctcccaaagtgctgggactacaggcatgaaccaccgcacccagcctagagtccatgtttttagccactcagctccaggatacactgagcctggttgcatagtcaatttcttttcttttctttttttttgagatggagtgttgctctgtcgcccaggctggagtgcagtggcatgatctcagctcactgcaacctcagccttccaggttcaagaaattctcctgcctcagccagcctcccaagtagctgggattacaggcacgtgccaccatgcccaatttccttattttaaaatcaatgggacatgcgtggtggcttatgcctgtaatcccagcactttgggaagccgaggcgggcagatcacttgaggtcaggagtttgagaccagcctggccaatatggtgaaaccccatctctactaagaatacaaaaaattagctggacgtggtggcatgcacctgtagtcccagctactcaggaggctgaggcatgagaatcgcttgagcccgggagacagaggctgtagtgagccaaggtcacaccgctgcactccaacctgggtgacagagtgagactgtctcaaaaaaataaaataaaataatgattagtgactttaattccatctgcaaccttaactcttccttgctgtgtaacataatatattcgctagttctgaggacacctcggggggctgttattctgcccaaaaattagtattttgttttacaaatgaggagtattcttgtctttcatatgaagggagacagctaccaaggctgtctggggctccagtgtcagggcccaggctccttctgtcttgttgctccagcatcaaatgtggctttttcttgtggcccaatatggctgcttgagctccatccttcccatctacatcccagtcaacatgtggaggaagggagggagggaagaagaaggaaatgctcttccaggagcatggtacatgacactcctgtctacatcttgctgccagaacttagctagagatgggcactcaatgcctcaaaaagatggatctaggccaggcgcagtggctcacacctgtaatcccagcactttgggaggccgaggcaggcggattacgaggttaggagttcaagaccagcctggccaaagtggtgaaaccccatctctactaaaaatacaaaaaattagctgggcatggtggcaggtgcctgtaatcccagctactcaggaggctgaggcagaagaattgtttgaacccaggaggcagaggttgcagtgagctgagatcgcaccactgcactctagcccgggcgacagtgcgagactccatctcaaaaaaaaaaaaaaaaaaaaaaaagatctggccttgggttagctgtatgcctggtcacaaatcaaatttcctattactgaaggaagaacagatattgaggccatgtcacagattgaaggaataagaagcacattgaagggatgacagagtcagagaggacatagatgtccaggaaaaagtggaatccagcctttctacaatctgggtacagtagaaagaaggggggtgtggtcactgataatggctttcaagatatcccggaacctgtgggtgaccttatttggcaaaagaaacttcacagacgtgattgagttcaggatcgttcaatcagaggttgtcctggaagatctgggtggaccctaaatggaatcactaggctccctagaagagggaggcagaggaagatttggctacagaggaggaggcaaggtgaggatggaagcagaggttggagagatgttatttgaagatggaggaggccacgagccaaggaacgcaggccaacactggaagctgaaaaggtcggctgagcagggtggttcacacctgtaatcccagcactttgggaagtcaaggcaggcagatcacttgaggccaggagttcaagaccagcctgtccaacatggcgaaaccccatttctactaaaaaatacaaaaattagccaggcatggtggtgcatgcctgtaatcccctctactctggaggctgaggcaggagaattgctcgaacccaggaggcagaggttgcagtgagctgagatcgtgccactgcactccagcctgggcaacagaacaagactccagcacaaaaaggaaaaaaaaaaaaaaaaaaagaagctgaaaaggtcaagagcatggattctccactggggcttccgtaaggaaccaatcctgctgacatcttaattttaatcttgtaagacccaagtcagacgtctgacctccacagctgaaagaacacatctgtggtgttgtaagccactaagtgcattgccattggttacagcaggcacaggaaatgaaaacagtaactctgccctaaaatctcccttattccctaagagatataactgggggaggagatcccctgcgaaggtgggtgttggctgaagtccttcagggaaccaaaatgattctggggggctgggagaggggacttccagtaggcaaggggcagattcgagtgactggtgtcactttgctcaaaagtagtagtaggctgggtgtggtggttcacacctataatcccagtactttcggaggccaagccaggaggattgcttgagcccgggagtttgagaccagcctgggcaacatagtaagaccctgttgctactaaaaatttaaaaattagcccggtgtggttgctgtagagagggaacagcccctgctactggggaggctgaggtgggagcatcacttgagcccaggcgatccaggctgcagtgagctataattgcaccattgcattccagcctgggcaacacagcaagaccctgtctcaaaaaaaaaaaaaaaaagaagtagtagtaataaaaagaatgataaaaatggcagtaataaaaagaataccaataacaactaccggcatgtgcatctttattgcatgccggactctccgctaatagccttacacacgtgttcttttatcttcatagctaccctatgggacaatgagtccatcaaaatgggctgcattttcctgcagtaacaaatgacctcaagtctcagcggcttacgcctgcgaaggctgattgcctgcttacaccgtgtgctcatcccaggacactttggtgctgtgcttgtcattgtcctcacccaggctgagagagcagctaatccctggctcattgccagtctctgatcccagggaaaagcaggtgggataggcaccggcacttagtgcttaaagcttcattcccagatgacacaggtcacaccactctctccctttttttttttttcctttctgagacagagtcttgctccgtcacccaggctggagtgcagtggcgtgatcttggctcactgcaacctccacttcccgggtccaaccgattctcctgcctcagcctcccaagtagctgggattacaggcacacgccaccatgccctgcttatttttgtattttttaatagagacggggtttcaccatgttggcaaggctggtctcgaactcctgaccttgtgatccgcctgcctcagcctcccaaagtgctaggattacaggcgtgagccaccacgcccagccacattttaaaattttacaagtgacttcataaagtagatgaaaacgttgcccttgtggagattacactccagtagagggagacaggcaataaacaatttaaaataaatgtagttgccaggcacggtggctcacacctgtaatcctcgaaacttgggaggctgaggcgggcagattgcatgaggccaggagttcgagaccagcctggtcaacatggtgaaacctcatctctactaaaagtaccagaaatattagctgggtgtggtggtgtgtgcctgtagtcccagctactcaggacactgaggcatgagagttgcttgaacccaggaggtggaggctgcagtgagctgagaatgtgccactgcactgtagcctgtgcaacagaatgagaccctgtctcataataataataataataataataataataattgcagtgattgaatgccatgcccagtaggtgctatggagacaagtacagccgggagggaggatggagtgaggcgggtgcccttttgaatagcgtgatcaggggaccctcatgcagaagcatttggtcgaagactcgaggaggagaaggagggagacatggtgatactgggggaagagcattcgaggtagagggaacagccagtgcaaaggaatatttgaggaatagcaaggagtggacagaggtagacggagaaagggaggagatgaggtcagagtggtcacaggggcaggtcatgggggcctcacgtaaggtctttgtcactaaatatataaagtgaatgattcgggtcactccctttaccctgagtgacatggagccatgggcagattctgagcaggggagggacatgacctgcctcaggtgttcacttctggacatcaatgtcatgggcttaaaacagtcacatggccagatccaacatcaaagggcacagaagtacactctgcctttggcaagtccgtggcgagggtatagatggagggaggggtgaagaatttgcatcagtaactggatcttccccaggagtcatcactgtagcagtggggttgggttttaaaccatgagaatagacaactgcatcacagatagatgcgggagaaggctggggctgagccctggggtagtccagtgtttttgattttttgtttttgtttctgttttttttttaattttattttatatatatatttttgagacagggtcttgctctgtcgccaggctggagtgcagtggtgtgaccttggctcactgcaacttccaccttctgggttcaagtgattctcctgcctcagcctcccaagtagctgggattacaggcgggcaccaggacgcccagctaatttttgtatttttagtagagatgggggtttcaccatgttagccaggatggtctcgatctcttgacctcgtgatccgcccgccttggcctcccaaagtgctgggattacaggcgtgagccactgcacccagcctgtttctgtttttgagatggagtcccagtctgtcacccaagctggagttcagtagcacgatcttggctcactgcaacctccacctcccaggttcaagcaattctccctgtctcagcctcctgagaggctgggattacaggcacctgccaccatgtccgactcatttttgaattttttagtagagactgggttttgccaggttggccaggctggtcttgaactcctggcctcaggtgatccacccgcctcggcctcctaaagtgctgggattacaggcttgagtcaccaggcctggcctttgtttttgtttgttaacataggatcttgttctgtcatccaggctggagtgcagtggtgccatatcatagttcactgaagcctccgcctcctgggctcaagagatcctcccacttcagcctcccaaagtgctgggattacaggcgtgagccaccatggctggcagatgccagtgtttagaaatgaggagggagaggaagaataagcaaaagagaccgaggaggagcagacagtgtcaggaggggacctagaccatggaaggacgtgaagaatgtgtctcagcagcagagggtcatcacccatgtcaccactgctgacacatcaggaaagatggaactgagaagttagttactcctggattcagcaacatggaggtcattggttgtcttgacaagagctgaatctgcagtggttggggcaaaagcctcattggaatgtgtggaaaagagacacaggggaagaggaagtagagacaagaggaagtaggaagagaagaagaggatggagacaatgcttgacaattgttgctgaaaagacaagcagaggaatggagtagaagctggaggggtaggggtggagatagaatttcttttctttctttcttttctttcttttctttctttctttctttctttctctttctctttctctcccttcctgccttccttctttgttccctctcttcctccttcctttctctcttttacttccttccttacttacttttcttctccttctccttcttctaatttctttctttctttcctttcttctttctccttccttccttcttccttccctccttccttcctcccttcccttccccttccttccttccttcctttccttccttcctcccttcctccctccctcctttctttccttccttccttccttccttctttctttctttctttctttctttctttctttctttctttctttctttctgtctctctctctctctctctctttctttctttctttcatcttgctctgtcacctaggctggaatgcacgatcatagctcactgcagcctccaaactcctgggcttcagtgatcttcccaccgcagcctcccaaaagtgctgggattacaagcatgagccactgttcctgtccagaatttcattaaataaggtgcaactgatgatgcaagaatgtggggagaactgtggagcatgttcttgagagagagggtgggacacagaggccaagtggagaagttgggcttggaaaggaggttggggatcatatcatattggaacaggaggatagcagagtatctaggcctagacgctgggaagtaagtagagctgctggtgggagcacaggggatttctcttctatggcttctgtgttttcagtggaagaaacaaagccatccgtgagcgtggacatgtgggaggaagagttggaggtttaagaagagaggacacagctgagagcggttgcccacgcctgtaatcccagcactttgggacaccaagttgggcagatcacttaaggtcaggagttcgagaccagcctgaccaacatggtaaaaccccgtctctactaaaaatacaaacattagccgagtgtggtggcacacacctgtaatcccagctcctcaggaggctgaggccagaggatcgcttgagcccaggaggcagaggttgcagtgagccaagattgcaccactgcactgcagactgggggacatagtgaaattccatctcaaaaaaaaaaagcaaatctggctagatgggcaaggcaggaagattgcttgagctcaggagtttgagaccagcctgggcaacatggcgagaccccgtctctactaaaaatagaaaaaaatagtcaggtttggtggcgtgcacctgtgttcccagctacttgggaggctgaggtgagagaattgcatgagctcaggaggtggaggctgtactgagccaagatcgtgcctctgcactccagcctgggtgacagagtgagaccctgtctcaaaaaataaaatgaaataaaataaaataaaataaataataaaataaaaaaataaaaataagcacatttatgataagttagaaggtgatatatgctataaaaaaagtaatacagtacaagatatcaggagcacttgtgtgtaattccaaaagtgctggaattacaggcatgagccaccgcgcccggcccaaaaaaactttaaaaacgggggacactgggtgcggtggctcacgcctgtaatcccagcactttgggaggccgaggcaggaggatcacttgaggtcaggagttcgagaccagcctaaccaccgtgctgaaaccccgtctctactaaaaatacaaaaattagccaggcgtagtggtgcacgcctgtaatttcagctacctagaggctgaggcaagagaatcgcttgaacccaggaggtggttgcagtgagccgagatcgcaccactgcactccagtctaggcaacagagtgagactctgtctcataaataaataaataaataattttaaaaaagaaactctagccaggcatggtggttcatgcctgtaatcccagcattttgggagaccaaggtgagggaatcacttgagtccaggagttcaagaccagcctgagcaatgtagtaagaatccatctctacaaaaaaaaaaaaaaaaattagccacacatggttccagttactcaggaggctgagtggggggcatcacttgcccctgggagattgaggctgtggtgagctgtcatcacccactgcactccagcctgggtgacagagccagaccccatctcaaataagtaaataaacaaaaaacaaaacaaaacaaaacaaacaaaaacagcttgtagagatgaaacaaagcaccctgctctagcagacagtggagttcagaaccacggagagcagcccagtggtgctgccttcccggcaactgtactagctcctctcatgggggtttccattggccaatcccttccttagatcattgttctgaagatgacaaggaaacctttaggatcaaagtctttgctgctattggcttgtcaggtggcccaatttgaatctgaactggagttcgtttgtatacacaatcataaaactaatttgtcctttttgacatcagaattggagatacatgaatgtaggatgtattagactgccttgtcattcaaagcaaggaattaattcttcccttacaaagcaaggaattaatttcttggggaaaattataaatctctgacttatttacctcaggcttggctatgtcacgtgtttttgccagtgaaatgggagaggaagtaaagtggtttgtatcatttcttttctttttttgagatggggtctcactctgtcactcaggctggagtgcagtggcacaagcatggctcactgcagtctcaaactcctaggctcaagcaatcctcctgcctcagccatccccctccccacccaagtagctgggactgcaggtgtgagccaccaaacccggctaattttttgtatttttttgtagagatggggtctcactatgttgcccaggctggtctcaatctcctgagctccaggaaccctcccacgttggcctcccaaagtgctgggatttcaggaatgagccactgtgctcgaccaagtgtgtatcatttctgaacagaaactccgagagccagtgcatcgtccactacgggctctactgtaagaccagcaataagatgcttaagatgattttggctgcaagtaacagggcaagaccctgttttttaaaaaaggaaagaaacaaagaaaaggaaggaagttttgaaaatagaggaaaagggaggggcaatttatggaggaatgagacaggaggggccagggccaggcaccggcccaagttaggaagaaagggcactcatccctcatgacagggagcagggcaagtgtggggccaggtaggagatgaggaaggtccacccagcagcttctgtgaagtagatggcaaagtaatgcatttggagaggggcagggtgacaggtagtggatatgaggaagcagagaagggttgaaaaagccagagtgaaactttgaagagacaagtgtttgaagaagtggtgttgccacaagagggggcagttgaaagagcctggtgcccccagatgattcatcccttctccgaccccatggacaccaaacacaagaacgttgacagcttcataccgtggcagctttggggaatggtgatggcagagcaggcccattgagccagagttcttcaactttgagggaaactcatctttccttttcatgggtttcatcaaggatgattttggctgcaagtaatagaaaaccctaactcatttgagaggctgacgtaggcagatcacgaggtcaggagttcgagaccatcctggctaacatggtgaaaccccgtctctacgaaaaatacaaaaaaattagccggatgtagtggcaggcgcctgtagtcccagctactcaggaggctgaggcagaagaatggcatgaatcaagaggtggagcttgcaatgagctgagatctcaccactgtactccagcttgggtgacagaacgagagactctgtctcaaaaaaaaaaaaaaaaccctaactcaactggcttttaaatttgtatatatatcccaagtagctggcattacaccacgacacccagctaatttttttatttttagtagagttggggtttctccatgttggccggctggtctcgaactcctgacctcaggcgatttgcccaccttgatctcccaaagtgttgagattacaggcatgagccaccgcgcccgactaacgcagaaactcttaacaaaatatttgcgcatagaattcatcaatagatcaaaagaattatacaccatgacccaatggggttcatttcagagatgcaagcccggttcaatatttaaaaataatcagtataatccaccaaaacaggtggaagaagaaaaatcacatgatcatatcaaataatgcagaaaaagcatttgccatacttcagcacccgttcatgattaaaaagaaaaactctcagaaaaagtggaatggaggggaactgcctcaacttgataaagaacatctataaaaagcctacagctgtggggccaggcacggtggctcatgcctgtaatcccagcactttgggaggctgagacaggcaggttgtttgagctcatgagttcaacaccagcctgggcaacatggtgaaaccccatctccacaaaaaatgcaaaacttaatgatggaagactgagtgctttctccctaagatgaggaagaaggcaaagatgtcctctatcaccattcttattcaaccacagtactgaaagttccatctggtgcaatcaggcaagagaaggaaataaaaggcaactagatcaaaaaagaagaaataaaactgttagcaggctgggtgcaggggctcacacctgtaatcccagcactttgggaggtcgaggcaggtggatcacaaggtcaggaattcgagaccagcctgaccaacatggtgaaaccccatctctactaaaaatacaaaaattatccaggcttggtggtgcatgcctgtattctcagctactcaggaggctgaggcaggagaatcttttgaacctgggaggcggaagttgcagtgagccgagatcacgccactgcactccagcctgggcaacaagagtgaaactctgtctcaaacacacacacacacacacacacacacacacaatctgtttgcagatgacataattgtcaacatagaaaatccaagtaatctacaaaaattctcatagcactgagtccagcaagatgagagtatataagacaaacatacaaagatcaactgtctacattagcaacaaatgcactcattctatcaagaaatacttacacctaaagtgtgccaggcactgttttgtgtgctggggacataaaagtgaacaaaacagacagaaatctcttttgattgttggttgtgtgggggttttttgtttgtttttgttttttggtgtttttttgtttgtttgtttttgtttgcttgtttgtttgtttttgagactgagtctttctctattgcccaggctggagtgcagtagcacaacctctgctcactgcaatctccgtctcctggtttcaagcaattctcatgcctcggcctcccaagtagctggaactacaggcacctgccaccacgcccagctaatttttttgtatctttaatagagacaaggtttcaccatgttggccaggctggtctcaaactcctgacttcaagtgatcctcctgcctcagcctcccaaagtactgggattacaggcatgagccactgcgcctggcccagaaatctcttttgaacaccaaaacaaaaaatacagctagcctcagtggttcatgcctgtaatcctagcactttgggagaccaaggcaggctgatggtttgagggcaggagtttgagaccagcctgggcaacatggcaaaaccccatttctattaaaaaaaaaaaaaaaaaaaaaaaaccttggcatggttgcacgtgtctgtagtttcagcaacttgggaggctgaggtgagaggatcacctgagcccaggaggtggaggctgaactgagctgtgattccgccactgcgctccagcctgggcaatagagcaagaccctgtcctcaccaaccccccaaaataccatttataataacttttaaaaaaagaatcgcttaggtgaaatctaaggactcatatagtgaaagctataaaaccctgatggaaaacattaaaggagacctaattaaaaggagagacacactgcatttgtggattggaagactggacggagtaaagacctcagttctctccatattgatatgtagacttaatgcaattcctattcaaaactccagcaagacttttcagatatagacaagattattctacaatttacatgaacgctaaaggaactagaataagtaaaccaattttaaaaagaataggccgggcgtggtagctcacacctgtaatctcagtactgtgggaggctgaggcaggtggatcatctgaggtcgggagtttgagaccagcctggccaacatagtgaaaccccacctctactaaaaatacaaaaattagccaggcatggtggtgggtgcctgtagtcccagctactcaggaggctgaggcaggagaatcactcgaactcaggaggcagaggttgcagtgagccgagatcgcaccattgcactccagcctgggtgacagagtgagattccgtctcaaaaaaaaaatttaaatcagcaagagaatcgcttgaacccaggtggcagagtttgtagtaagccaagatcgtgccactgcactccagcgtggacaacagaacgagactccatctcaaaataaataaataaaattaaattaaacatttttaaaaattaaaagaagaataaaataagaggaactagcctgctgatttcaagacttaggatacactacagtaactgacagtgttgttttggtagagggagagacacatagaccaacgcaacacaatagaaaacccagaaatagacccacacaaatacgcccaactgatttttggcagaggtgcaaagccaactcaattgaggaagaatagccttttcaacaaatggtgtttggaccaattggatatctataggcagaaaagtggatcacaatataaacctcagatcttacgctcaaaatggatcaaaaatttaaatttaaagtgtaaaactaggccgggcacagtggctcacactgtaattccaacactttgggaggccaaggtgggcggataacctgagcccagaagttcgagaccagactggccaacacggtgaaatacaaaaattagccaggcgcagtgacatttacctgttatctcagctactcgggaggctgaggcagaaggatcacttgagcccaggaggcggaggttgcagcaagccaagatcacaccactgcactccagcctgggcaacgggagtgaaaccctgtctcaaaaaaaaaaaaaaaaaaaaaaaagtgaagctagaatatatttttaaaagaacataggggaaaatctttgggatctgaggcttcggaaagagtttttacacttgacactcaaagcacgattcataaaatgaaaagctgagaagttggacttcatcaaaatttaaatttttaatctgtggaagaccccattaagaagatataaagagttggccggtgtggtgacccacacctttaatcccagcactttgggaggccgaggcggatgatcacttgaggtcaggagttcgaaaccagcctggacaacctggcaagaccccatttttacaaaaagtacaaaaattagccaggcatggtgttgcatgcctgtggtcccaactactcgggaggctgaggtagaagatcatttgagcccaggaggtcgaggctacaatgagccaagattgtgccactgcactccagcctgggcaacaaagcaagacccaatcttaaaaaaaaaagaaaagaaaagaaagaaagaaaagaaaagaagaagacagaaagacaagctacagattaggagaaaatatttgaaaaccacatatctgacaaaagactagtatctagaatatatatttattttttaaagcctctcaaaactaaaaagtaaaagaaaaacaataatctaattagaaaataggcaaaaggccaggcatggtggctcacgcctgtaatccagccctttgggaggccaaggtgggtgaatcatttgagcccaggagtttgagaccagcctgggcaatatagtgagactcctgtctttacaaaaaataaagaataaaaaaattagctgggcatggtggcacacacctgtagtcccagctactcaggaggctgaggcaggagaatcgcttgagccagggaggctgaggccacggtgagtcatgatctcaccactacctgcagcctgggcaacagagcaagaccctgtctcaaaaaaaaaagaaaggaaaggaaaggagagggcaggggaggggaggggaggggagagaaggggaaaggagaggggataaaggagaggagagaaaggaaaggggggaagggaaaggggaaaggaaaggaaaagaaaggagaggagaggagaggagggggagggggaggggaggggagggaggaaggaaaggaaaggaaaggaaaggaaaggaaaggaaaggaaaggaaaggaaaggaaaggaaaggaaaggaaaggaaaaagtctggggttggcagatgccagacacagaatgttcataattaattacgtcatcctaattcagtcccaagccccttccagctctctctctctctgtgtgtgtgtgtgtgtgtatgtctgtgtgtgtgtgagagagagagagaagatagggtttcactgtgttgcccaggctggtcttcaactcttggcctcaaatgatcctctcaccttggccttccaaagtgctgggatgacaggcgtgagccattgtgcccagccccttccagctttgttctgtcatttcagtatttcagtatttcagtttgtcagcctgagcctcagcctgtctcccctcataggcacaaggtggctgccacagttccaggcatcacatacaaagaggacaacactaacaagaggaaaatatgctccctttacctttcttcagagctgagctctaaacccaacaggttttatttcacagcctgtgccctccaacattttgccatcctgaagaaaggacaagaggcagcactccaatcaccactccattctgatcactagttccaggcctttcctcgtctttgggtatctccttttctttcctttcctttcctttctttctttctttttttttttaagagacagtctcactctgtcactcaagctggagcacagtggtgtgatcatagctcactgcagcctcaaactcctgggttcaagcaatcgaccctcccacctcagcctcctgagtagctaggactacaggtgtgtgccatcacacttggctaattttttaaagtttttctgtagagatggggtcatgcaatgttgcccaggctggtctgaaactcctgggctcaagcgatcctcctgccttggcccccacaaagtgctgggattacagacatgagcctctgcacctggcctacctttgggtattttcattttcatttttagttttgaatataaaatatttgagacccacaaaagaatatttgaagtgcacatgagtcacgcatcttaatgatcaatgaatatttataaacccatcactcaacttaaatcctagaacatcataatactattggagctacctatgtgtccttcctgacttttttttttttctttgagatggagtttcactcttgttgcccaggctggagtgcaatgatgtgatcttggctcactgcaacctccacctcccgggttcaagctattctcctgcctcagcctgcatagtagccaggattacaggcatgcaccaccacgcccagctaattttgtatttttagtagaggcagagtttcaccatgttggtcaggctggtttcgaacccctgacctcaggtgatccgcccgcctcggcctcccaaagtgctgggattacaggcgtgagccaccacacccggcctctgactttttgttttgtgttgtgttatccttccattgatttttccttctgtttaaccacactagagtgggtcgttttgttgttgagccttacaaaaatgttattttattatatgtagtcttctataggttggtgtttgaactcaacattgtattcctgcgtctgttggcattagatgctaagacagagctaggggtgtgaagttttttggtaggtgatgcctaaagaaatacaagggggaggaaatagaatctggcaggaggagcctgagaccatgatgttgatctgattcatctgggagaggaaaaaggtgaggtgggattgggcagggaaaggctcagaatgtgatattattttttttcctgtagacacggagtcttgctgtgttatccaggctgttctcaaactcctggcctcaagtgatcctcccacctgggcctcccaaagtgctgggattacaggtgtgagccaccatgcctggcctgaataagatgcatttctggcaatgttgaccaatgccacagggagctcagaacacaggtcattcattagaggagcctcccattgggtaggcacggcctgatctgagaagccatgctcaataatcactgatgtcttccccaggtcttggctcaaaagctgatgcagatcctgaaggcactgccctgcttgcaacagaatggcacggtcttttttgaagggatggctgggctcagtggctcacacctgtaatcccagcactttgggaggctgaaagaggctgatcacttgaggtcaggagttcaagaccagcttggccaacatgaggaaaccccacctctattaaaaatacacacacggccgggggcggtggctcatgcctgtaatcccagcactttgggaggctgaggtgggaggatcagctgaggtcagaaattcgagaccagcctggctaacatggtgaaaccctgtttctactaaaaatacaaaaaattagctgggcgtagtggcacatgcctgtaatcccagctactcgagaggctgaggcaggagaattgcttgaacctgggaggcggaggttgcagtgagctgagatcgtgccattgcactccagcttgggcaacaagagcaaaactccgtctcagaaaagaaatacacacgcctgtaatcccagctacttgggaggctgaggcacgagaattgcctgaacccgggcggtgaaggttgcagtgagccaagatcatgccactgcactccatcctggtggcactcctctttggttgccacagtgctaagatttatccatgtggaaatgtgtggtagttcatgttcctgctgcatggtattccacacccctcatttcagtgattcatttgttagcagctatttgggttgattctaattttttgctgttacaacaaacactgcaaagaatattctttttttttttgagataggatcttgctctgtcacccatgctggagggcagtagcttgatgatgacttactgcaacctccacctcccagggctcaagcaatcctcccacatcagcctcctgagtacctgggactacaggcatgtgccaccccacccacctaatttttgtattttttttttaatagagacagggtcttgccatattgccaaggtttgaactgctggcctcaaattatcctcccaccttggcctcccgaagtactgggattacaggtgtgagccacctcttcttttttgagatggagtctcactctgtcacccaggctggagtacaatggtgtgatcttgtctcactgcaacctccacctcccaggttcaagcgattctcctgcctcagcctcccgagtaacaggtgtgagccaccacgcccgaccaagtcacctttttcctcaaagaacattcttgtaccacctgtgtctctattgcatgtgtataagagtttctgttgatatatcttagatttggaatttctggctcatgcaatctgcatatattcgacaagatagtgccaaaatgttttctattagattctttaacacagcctttaaccttgtactacattcctcttttcatttaagctagcttgagtgggtttctattgcttgcaattctaacctacctaactcatcaaaaatgactttttgatgacaactctgtgacattcctcccaagaggtccccaccctgacaatagtcacctcaggtttagaactacaggaggttatgggtgaatgaggcacaaacacaagtttgacacgtccttagcaatacactcacactggctggacacggtggctcacacctgtaatttcagcactctgggaggctgaggcaggaggatcacttgagcaaaggaattcaagaccagcctgggcaatgtaaaaatgtaaaaaaaaatgtaaatgtaaaaaacaaaatgcaaaaaataaaatgtaaaaaaaataatagtaggccaggtgccgtgactcacacctgtaatcccagaattttgggaggccgagatgggtggatcacaaggtcaggagtttgagaccagcctggccaacgtggcgaaaccctgtcttctccactaaaaatacaaaaatcagcctggtgtggtggtgggagcctgtaatcccagctactcaggaggctgaggcaggaaaattgcttgaaccccagaggcagaggttgcagtgagccaaacttgtgccactgcactccagcctgggagacagagtgagactctgtctcaaaaaaaaaaaaaagtagtaaaaagactttttaaaataagataagacatacactcatacatgcagatcctcggtccatgatgatgccattttcctgctgctctgacccaggcacagcctccctctggacatcttattagttggcctaatgactgcttgtgatgtttaagtcatttgcaattaaatcttccacaacttgtaactgaaagcatccttagtgactttttcactcttcattcattctttcatattcttactctctgtccctccctctttctctctccctttcttctttttcttttctttttttttcttaaaggaggggtcagctggatgcagcggctcatgcctgtaatcccagcactttaggaggccaaggtgggtggatcacttgaggccaggagttcgagaccagcctggccaacatggcaaaaccccgtctctaccaaaaatacaaaaattagccagcatggtggcacacacctgtagtcccagcaactcaggaggctgaggcaggagaatcgcttgaactcaggaggcggaggttgcagtgagctgagatggcaccactgcactccagcctgggggacagagtgagatcctgtctcaaaaaaataaaaataaaaacaaaaataacaaaaagccagggtctcactccattacccaggctggagtgcggtagtgggatcatactcactgcagcctcgacctccctggctcaagtgatcctcctgcctcagcctcctgagtagctgggactacaagtgcacaccaccatgccaggctaattttttttattctttattttttatagagattggagtcttgctatgttgcccaggctggtctcaaactcctgtgctcaagcaatcttcccaggacggcctcccaaagtactgggataataggcataagccatcctgcccagctttctctctcctctgtctcacacacacacacacaaacacgcacacacacacacacacacacacacaaacacgtacagctacagtcacatatgcagacaagtggcgttcagtcattaataaagtcacatatacaagcaaggtcaatgtcacagacaaatttcttattgtttgttgtcacaaattgtataaaaagaacaagagcaaacattttttgggggcttcacaaacaaatagggatctggaggtggtaatctaggcaaggtagttggtgcatacatacctaaggtaatggatggtgctatggtttgaatatttatctcctccaaagctcatgtggaaaccaaatccccagtgtggcagaattaagaggtgtggcttctaagaggtgattggattatggattcgtggactaatggattaatgggttgatgtgttactatgagggtggcactggtggctctatttatttattcatttatttagacagagtctcgctatgtcacccaggctggagcgcagtgccatgatcttggctcgatgcaacctccacctccagggttcaagcgattctcctgcctcagcctcctgagtagctgggattacaggcttgagccaccacagtcagctaatttgtttgtattctcagtagagacagggtttcactatgttggccaggatggtctcaaactcctgacctgaagtgatccacccaccttggcctcccaaaatgctgggattacaggtgtgagccaactggtggctttataagaagaggaagacagacctgagttggcatgcttggtgccctcgccctgtgatgctttgcaccaccttagggccctgcagagtccccaccagcaagaaggccctcagcagatgaggcctctcgaccttgccgttctcagcctccagaactgtaaggaataaattccttttctttataaattacccagtttcagatattctgttgtaagcaacagaaaacagactaaaacagacagatggcaggtgggtctcaggggcagacacacgggtctccactggccacacacttcaggtcccaaatagagaggcagaaaaggccaggtgtggtggctcatgcctataattccagtgatgtgggagggctagcagggaagatcgtttgaacccagaagttagaggctgcagtgagctaggacctcaccacggcactccagcctgggtgatagtgtatgtctctcttaaaaaaaaaaaaaaaaaaggagaagggaaggggaaggttcaagacagtggaggcacgaggagccccagaactctgttggggagacactaattcgtgcacctgccatcctcccccaggacccaaaggacccgggtctgtcatcttcctcggggcctcctggagctggtgcagccagtggtggaggcggccccggggcctgggccttgctgaggctggatctgtgagcagaggagggcggtgtgtgaggcggggcctgggccaccacaggggaaggatgctgctcagagcccacagacctgggtgcccgggccccgaggactcacactggccccaagctgggagaggatgttgtggagggtgtgaaggagctggtccaggacatcccccagggccggatcagcatcagcggtgacctccaggaccttcagtgtcagggccagctcagcctccaaagccacagggcgctccctcacctgaagagaggtgagaaagagcaggtgagggggcgggtgaggggaacagatggggggaggaggatagagaggaacaagtgaaggtgacaagcacaggggagagggcacagccagtgtggtcaggtgggagtagagggaagggggagcaggtgtggggagaggagagagggacaagggagaaggagaagatgaaggggccactacagagccaggtgagtggggctgggagagcaggggtgggcctgactccccctctcacctgcagctgcctcaggtcccaggtcctggggaagaggcgggagcggcacctgcagtccttcagcagaagcgacacttcctagacagcaaaggcacaggttagccccagcaggaggggtggaggttagaccactctgatgggattggaggatggctgacaacaggatagggaagttaactggtgggaggatagtagaggaccctcttctacagaagaacatgcgtcagtccctgcagtaggagcatgagatagcctactgcagggagggtggaggctagcccagtgaaggaagctggaggtcttcgctcaacaaagtcagcatggtgacccatagagggtgatggaggctagcccacggcaggaggggcagggggagactcacacaggcctcgttctgtctattaaagcctgagctgcatggacttcctgtctggttcctgcgcctttttcaccagggggatgcagtgtcctgggctccacggctttgggtctctattcagtcttattcaaagtctctggcttcggtctcttcttctggatctccacctgctgctctgggtttggctgtttctgatttccagctcggtctggggtatcattcctgcctgagctccagggcacactgtttagctgggacagaggccagtcccacgggtgcagagcggcctgaggcaccggagggggtggggtgggggaggcccaggctggagaagtccagagcagggcggggccaggtgccgcagctgcccctggggaaagagaaagtgacacgtgcccgggccaggctctgtgttcgcctacaggaaggtgacttcctgaaccacacatgcctggggctgtagcagcttcagctcaggaggaggagccacgggtgcccccagggcaggactagggtttgagggggcgggtgaggggcttgtgtatctgcagattgctcagatgtggaggggggtggctgagggaaacccgggaagtatttccctgaggggtggaaggggggactctagaaggagactgcttagggtaggggagaccacccagggaaagggatactgtggggatgggaggacggagtcagtgaggccaagaccacagagtataaagaaaaggacaggccactttggtacgccaaggcaggaggatcacttgaagtcaggaatttgagaccagcctgggcaacatagcaagacccccgtcactacaaaaaaaaatttttttcgactagccaggcatggtggtgtgcccctgtagtcccagctactccggaggctgaggcaggaggatcacttgagccctggagttcaaggttgcagtgagccatgattgcaccactgcactgcagtctgggtgacagagctagacctcgtctcaagggaaaaaaggagagccctccctgcactcccaactctccccaacctgccatcagttggggggtgggggaggcaggaacaggggagtgacagtgtctactcaggaattcaggtacagctgagggcttcaaaggaagcaggttgattgtaacagacccattcctttattcattcattgaatctgtcattggttcaaaaagtatttattgagcaggaactatgggccaacactgtcctgtgcactgagggcccagcagagaacaaaatacacaaaattccctgtctctcgaggagctgacataccagtgggagagtcaggcagtaacaaataagttaaatatgtacaatgtcactgaaagaagcgcttttgagaaaaattatgctgcagatggagccggctgaacccagaagaagttgcctgctctaaggcagccagagaaggggacatctagttgaaaacctaaaggaggagggagggaacagcattctaggcaacgggaacagccagtgcaaagtgaggacaacgacaagtttctctaacggatgccaccctgtcccggaggctttacacatgcaagagcagtgaattctcccaacacctctgagaaaggtaccatgctttcttctaccttgaaaatgaagaagctggtactcagagaggttaagagacttggccaagtttacacagcaggtatgtgctaagagcagtctgagttttccctgacacccaggccttaacccctgcacctcctgccttcagaggttttgagtttttctttttttttttcttttgagatggagtctcgctctgttgcctgtcgcccaggctggagtgcagtggcacgatcttagctcactgcaaccttcacctcccagcttcaagtgattctcctgcctcagccttctgagtagctgaaaaccatgtgtattcctgggcctgtggatttggaagggcagggaaaaccatgtgtattttcatttggaagggcagggaaaaccgtgtgtattttcatacaggcatccgccaccacacctggctaatttttgtatttttagtagagatgggggtcttaccttgttggccacgctggtctggaactcctgacctcaggtgaccctcccacctcagcctcccaaagtgctgggattacagacctgagctaccgtgctgaccagaggtattgagtactttgaagatacttttctgagtccttggtcacctgaattctgcccatccagggagtcccttgaggaaacctgggggctgatcttgccatgtgcacatgtgctccgaaaccctcttgcccctccatcctcagcattattagatatggagactagtactggccaccaaacccaagactacattctctagcatcctgcatgctagggatgaccatgtgactaacccatcaccaccatctaggccttaaaacacagggtgggtggtccctgctctgtttcctattgtcaccactgaaaaactggacatgtctgagagccgaatcctgctgtacaggtgagaacaaactccaggacagggcttctaacctggcagaagaattcctgggcctgtggatttggaagggcggaaaaactatgtgtattctcactaacctctgtctgaaatttgatatttcctgaatgtatgtttcttacacctgctgtaacaaatgacccccaacttagtggggtaaaacaactcagactttccagggatggatagacggatgggcaaaatatagtctacacatatgatggaatatgattcagccttcaaaaggcagaaaattctggccgggtgcggtggctcccacctgtaatcccagcactttgggaagccggagcaggaggatcgcttgaatccaggagttccagatcagcctgggcaacatactgaggcctcgtctctataaaaaatttaaaaattagccagatgtggtagcacacatttgtagtgctggctactcaggaagctaaggcaggaggatcacttgagctgaggaatttgaggctgcagtgagctgattgcacaacagtactctagcctgggtaacagagcaagaccctgtctctaaacttaaagacagagagagagagtccaggcgcggtagctcatgcctgtaatcccagcactttgggaggccaaggccagtggatcacctgagatcaggagttcgagaccgacctggctaacatggtgaaaccccatttctactaaaactacaaaaaattagctgggtgtggtggcagacacctgtaatcccagctactcgggaggccgaggcaggagattcacttgaacccagcaggtggaggttgcagtgagccaagatcgcgccactacactccagcttgggcaacaagagcgaaactctgtctcaaaaaaaaaaaaaaaaaaaaagagagcaagaggagggaaggaagttctgacacatgctacaataaaaatgaactttgaagacattatgtcagtgaaataagccagtctcaaaagaacaaatgctgtatgattccccctacatgaggtgctgagagaagtcaaattcctagaaacagacgtgtctaaatatttgccggggtagcgggaggggttaataggaagttgttgtttaatgggtacagagattcaattttgtaagatgaagagagttctggagattgcttgccgaacaatgtagcaaacaccactaggaccagacctgtaatcccggcactttgggaggccaaggggggcagatcacttgaggtcaggagttcgagaccaacctggccaacatggcaaaaccccatctctactaaaaatacagtaattagccaggcatctgactggctaatggcacacacctgtagtctcagctactcaggaggctgaggtgggaggatcacttgagcctaggaggtcgaggctgcaatgagctatgatcatgccagtgccctccagccagggtgacagagcaaggtcctgtctcaaaaaaaaaaaaatagaataaataaataataaaattgcactactgaacaatgtgctttagaaaggataagatggtacattttgtgggtttcccacaattaaaaaaaatatttaaattacctgaacaaaaagaacaaaacaaaatgcatgcacatttctattcctacagttctgacagtcaagatgtcagcagagcgggttccttctggaagcagcaggggagatctctctcctttctcagcctctgggggtgtccagcatcccttgaccccggttcccttcctgacatcactccaatgtcctgtttctgtggttacatcttccgctaatgatgctgaccccggcctccttcttagaaggacttttgtgatgacattgggtccaggtggacaacccaggataacgcccccatcccaaacccttaacttactcacatctgcagagtccctcgtgccatggaacataacatattcccaggtccaggaatcaggaacatctctggggaccagtcttgcatctagcacgaatccattacaaatgcagcaacacaccacagcagtgttagcagaacttgtgactgttaccaaaagaaatcacaggcatttcctatcacgttatcttccagcaggcaccttgaaatgtcatttatgctcatctctgcttctaagtcacagtggttattaaagctgccacaggtgattttttacttaatgcattcatgaagaagcacatgaattgctatgtcacagtgtgaaaaaatattttgatcactgtattacaatcagagttggattcctttgtcctgcacgtgttctttccttctgagaagggtccgtaggcttttcaaggctgccgtgaggtccggtgggtgaagatgatgagggagccctgtcccggggactgtggagcacagaactgccaggaaccagggcccctggatgactgagtggggccatcctgccagggggagcgctcaccttgggaggaggagctggtggagaatgacactctgtggtttgtaattcatgatcactgtatttgggggactctttgttccagcagctcagccaactctactcagcaggggtccctgatccaagttgtcctcctcatctgtaggggcttatccagggttagtgagacctcatgtttgcttatacaattcaggggcttcttggaaagagaatgggctggacccggtgactcaagcctgtaatcccagttcggggaggggctggagagggtggaggatggtgccgaggagagagaatcacttgagcccaggagtttgaggctacagtgagatgtgatcacgcaagagacaggatcttgctgttgctcaggctggtcgtgaactcctgacctcaaacagtcctcccatctcagcttccaccagtagctgggattatgggcttgtgccaccacacccagccaattctctaattttttatagagacaggatcttgctatgttgcccaggctggtctgggctcaagtgatcctcccaactcagccacccaaagtgctgtgattacaggcttgagcaatcacatccaggctctaaattaattttaaagatgcttcatttcacccaatacatccaaagtgctatcatttcaacatctaatgaatatataaattataattaagctgttttacttttttttttttctccacagtaaatcttcaaattctggggtatgttttacactcactgaaaaaatgaggttgcaccacctacattccaggtgctcgatagtgacatgtgacctggggaccccagtggacagcacagactcaatgaacctgctgttctagatgctacttttagggtaatttgttatggcagcaatgcaaaggaaatacacaccaacgcacacacagtcccacgtcatgggtgtcttttcctcattgtttatttcaacaaggatttcaaaaagtagaaaaataaacattttcctggaggtgagttggatttacatacacaaatacataaatagcgactgggtgacaataaattaagccaagtggctaatttataaataaaatctcaggttgcatgactggcggaagggtcagacacacaggtccccgctggcaacacaattcaggtctcgcgtgaggaggcggaagaggttgaaggtgacagaggcctcgaggcagccaggggactcctgtagggaggaggggatgggtcaggggctgtctgggttctgggctcccagtggctccccagacctcagtccctctcttcccgggtcactcaccttttttggggcctcctggagccggtgcagccaatggtggaggcggccccgggtcctgggccctgccgtgggctgaggctggatctgtgggcagaggagggcggtgtgtgagccggggccttggccaggggaaggacgctgctcagagctcacagacctgggtgcccgggccctgacgactcacacaggcccggagctgggagaggatatggtgcagggtgtgaaggggctggtccaagacatcccccagggctgggtcagtgtcagcggtggcctccagaaccttcagcgtcagggccagctcagcctccaaagccacggggcgctccctcacctgaggagaggtgagaaagagcaggtgaggggggaggtgaggggaacaggttgggggaggaggatagagaggaacaagtgaaggtgacaggcacaggggagagggcacagccagtgtggtcaggtaggagcagagggaaggggtagcaggtgtggggagaggagagagggacaatggagaaggagaaggtgaaggggccactacagagccaggtgagcagggctgggagggcaggggtgggcctgactccccctctcacctgcagctgcctcaggtcccaggtcctggggaagaggcgggagcggcacttgcagtccttcagcagaagcgactcttcctagacagcaaaggcacaggttagccccagcaggaggggtggaggttagaccactctgatgggattggaggatggctgacaacaggataggggaggttaactgctgggaggatggtagaggaccctcttcttcaggaaaacatgagtcagtccctgcagtaggagcatgagatagcccactgcagggagggtggaggctagcccagtgaaggaagctgggagtgggaaagcatggtgacccttggagtgcgggtggaggctagtccatggcaggagggcagggggagactcactaaggcatctttggccctcttaaaggcctgcagctcctgtggagacagggacttgaactgggctatgtggcagccccttgcatccgggagagccccgcggagcctggcgacaggaactgctccagtcacggtcagcactgcggccatcagcaccagcactggcatgcagtccccggtcatgtctgtgtcacagagagaaagggagctgagggaatgcagaggctgcccactgagggcaggggctgcaggagctgagcacggacagagatgtgggactcacctagtttcattcctgatctctggtctttgtcagcagaagaaacactctgaggctgtcacccagggtctgtttgggtcttgtctggagtctctgttcttttcagtcccctcttctggatctcagactgtgtcctggctttgactctttctgtcagttttgagctctgtctgggatgtaattcctgcctgagctccatggggcagcttttatccctgacagaagggcagtcccagctgatgtaggaaaagtgaaaacacagcctcaggtaagacaccggccaccaggggagccccaggctgggaaagcccagagcagggcagggctagtgagccagatgagcagctggagggaaagagaaactgatggagactcaggggtaacctacaggaaggtatgttcccaagaggattccacctgctctggttttgttgttgtttaagacagggtctcactctgtcactgcagtgcaatggcatgatcacagctcactgcagcctcaaactcctgggctcaagccatcctcctcacccagcctattaaagtgctgagattacaggcctgagccaccactcctggcatatatatatatatatatatatatatattttgagacagggtcttgttcggtcacccaggctggagtgcagtgcaaaatcttggctaactgcaacctccgcctcctgggttcaagcaattctcttgccttagcctcccaagtagctgagattacagatttgtgccaccattcccagctaatttttatatttttagtagagatggcgtttcaccatgttggcaaggctggtctcaaattcctgatgtcaagtcatctctctgtctaggcctcccaaattgctgggatttcagtgtgagccaccatgcccagaggccaatatttcttaattgcccaggcaaggaaggactcaggaatatgaggctctgctcaagaattgaggtgtgacgaaggacttgaaggacaccacgtgggtgccgtctttcttagggaagttcaggcagtggtgaagagcatgggtcttggagatgaagggtctggggttcaaacctggttctgaccctcactagccgtgtgaccttggcaaggaggggtgcattcagcaacgcagattgctaatgcacagatttggagaaaaaattaataacacaattgtttgtgtatttatgtgagtgattatttaatagaatccactcattaagaccatactaggacctcagctggagagtttaaaacgtgatctcaacggacactactcctccacaaggcaagtatgctaacccatcctataggtgaggaaacagaggctcagaaaagtaatttgccctgaattccactgtaattaactggcagggtcagaactgaaactcaggccacctgagtccctggctcggcctctttttttgctgtaaggtgcacctcacaatcatcatacggaaaacaaccaatgcgatcaaaacactctttgataactggcaataaatttaaaccgggagacagaatagcaaatgcacaggaacttcacaaatacaaacacacgtaagggaatccaaagaaccacagtcggttaaggacccttgggcctttcactaccaaatccctcatggattggtgtcccttagatgccggatccaagagtcacggattcacagaatctcaaagctggctgtggggctacaaatccggggttaggacctggtgttgggggtgtcctggtaaccacacaaggaggaactggtccctgttgcctggggtcagccacggtttccagagctcaagttttttcctgccacagcaaccgttggagggtcgtacaatgcaccccgaggaaatatcgtggcttcctggagaactgtggtctcttccctgtagaaggacccgctcctcttatatctgagacagtggatccaagtcaggcccaaggctgcgaagaagttttcgtgcctcagcacccattgactgagagcctcgcccggccagcccaatggacgacaggagctgctttcggcagccaatggcgtggaggtttccgtgctgccagagggggcggggtcagaggcaaggcccagagtgtgcagccagccggagctcccacgtgagcaggcgcaggaggttgaagaccacgctggctttgcggcaccgaggcgagtcctggagccagggagggagggcagcggggctaagccaggctcttccccccgcccccggaatccccctccagtcccgctgctcgcagcctcagtcccgtccttgtcagcctcgcctggtcctccctgcgggctaaccctgtattgcctgttgcactcaccgctctccggggtttgtgacgcctcttctgggccccggggaccttcctggaggagcctggccgtgccagctcaagctggaggtgggacatgaggcaaatggaaaaggcgaaggacgaagcccctctctgcatctgcccgtggccctcccagccgcagactcgagcccggatttcaggacacccagaggacccgactccggtctggatgggtttttccgctaagcaggacagattggcaaagcgctggggctcgccgtgggcctgaggatgcagagaagctggcgggggagaggggcggcggggcgcggccgtcactcacgcaggccgccacatccctccccgcggccgccagcagctccaggatcgggccggcgccggggagcagctccgagcggtgcaggccgctgagcactgcctgggcgtccgcgatgccccgggccacgtggcggagccgagcgcaggactgcggggacgagagggcgttagagcgggccgcgcccgggccatgcctctcccgcccactcccgggcctcaccgatggccgcggaggatccctcctggggcggaaggagcagttgcgctgcccccagctcagcgcctcttcctcctgcgggacaagcggcgcttatcgcatacggctaggccccctcgccagggcccctaacctctgcacagtctgggattcctggacgtggatgggtactggcagcgcacggtcgtgcctgtcgtgtactgaaccagggagctccccgaaggcgcgaaccagggttgaattgcactccgcgctcccccagcaaagcccctcgccccgacctggagccgagtcctcccggcagggctcccttctgtgattgaccctgagcctgcgttcgcgctgacgacggggactgcgggggtctcgtggtgggaattgtgggcgctgacataggagaggcgcctgctgggcgctaggacgcaggaccccttgggacaggaacgggtgtatgggaacccggtggggccagggtcccagggggcacaggggctgggcggtgacttacgtagcggtccctcagcgccttggcagccgccagcgtccggggctccagcgagcggtagtgcgagagcaggcagcgccggggggccttctgcgatcaccgtgcacaggacccacagccccgcggccactgcggcccagacactcggccgcatctctgcttctgcagcaggcgagagacgtcagggaagccaaagagagggtccagcgcgtccagccccccgccttgggttaggatcccagggaaggcaatgctcggagcgtgaaggcacagcacacacagtgggagagagagtgggagccggccccctcctcgccttggcctctgccctcactcctgtctgcagtgcaccctctgtgcctcgtgctgcagcaggtgctgccgtccactgtcccctgggaggcgtccagagccgtctccacctgggcaacagtgcctcgacggtccatgctggcttttatgcgcagggctgagaatggggtttgcagccgggctttcccgtccagggcaagctttcccaacatcagagctggccccaggcctctgggatcccagtcgggtgtgaggacttcaacccgaggttggcctgtgcccgggatggctgccctccaacactcggtttccaaattgtctctgtccctgtttctactgtctgtttcctctttctttgcttcaccctggttgtctttatcttcgttctgcaatcacaaccagcccttgtgtagtgttgactgtgcatcaggctctcttctatgtaattgacacagacatatcatctcatttttgtaccagggcagccctggaggtgtagctgagaaagagaacgcttaatttattttattttattttattttatttcagagacagagtcttgctttgttgcccagcctgtagtagtggtgcagtcacagctcacttcagactcaacctcccaggctcaagcaatcctcccacctcattctccatagtagctgggactaccggtgggtgccaccaccattttttgtagcaacctggtttcgccatgttgcccaggttggtctctaacgcctgagctcaagacatctgcccgcctcagcctcccaaaattcttggattacaggcatgatccattgcacctggcctcattattttcttaaaccgtttttttctagtctctttatctatgggtgcattgattaaaagaactgcagatgcccgaaaggccacacgagcttcaggacgcttcctttgcttattactggaggaagaaaaggctggggcaaaacaagtgcaaaccagacacagtgacccacggttacctttagatcattaatatataattatcatggtaaactccctacccatggaggaaaatacgctcaccatttgctgaacatacatcatatgaagaggcatgcttatgatctgcacctgcgtctggagttgctctctgcgcatgcttacatacctccccaccccacagctaactccttaaaatttcccagctccccacagctgggcgataaggtgttttttgttttttgttttttttgagatggagtttcacccttgttgcccaagctggagtgcagtggcgtgatctcggctcactgcaacctccacctcccgggttcaagcaattctcctgtctcagcctcctgagtagctgggattacaggcacatgccaccatgcctggctagttttttgtagttttagtagagatggggtttcaccatgttggccaagctggcctcaaactcctgacttcaggtgatccgcccgccttggcctcccaaagtgctgggattacaggcatgagctcgcccagcaataaggtgtctttagagcaagagttctctccttccccatcctagctaggaataaaacctgcttgcctttttgtttccaattgggtgttctttctttgcaaccaatgcagagtagggaaagaactgcatttacaggtgacaatttcattgtcaaaaatgacacaagcccgggtacagtggctcaggcctgtaatcccagcatgttgggaggctgaggagggaggattgtttgagcccaggagttcgagaccagcctgggcaatatagtgagaccctgtctctacaaaaagtaagggatttaaaaattagctgggcatggtggtgttactggaaaagcatcctgatccagaccccaagagagggttcttagatcttgtgcaagaaagaatttggggcgagtccacagtgcaaagcaaaagcaagtttattttaaaaagtaaagtggtggctgggtgcagtggctcacacctgtaatcccagcactttgggaggccgaggcaggtggatcacttgaggtcaggagttcaataccagcctgaccaacatggcaaaaccctgtctctactagaaatacaaaaaaattagccgggtgtggtggtgcacacctgtagttccagctacttggaaggctgaggcaggagaattgcagtgagccaaggttgcgccactgcactccagcctgggtgacagagcgagaaaaaaataagcaaagtggcgaaggaatagctactccatagacagagtagggtgttcctgaaaataagaggaggaatgggcccaccctaggtacaatgcttgtttataacaaaaaatatcatggggagatgtgctctgctaccagggtttgtgacaaaggattaaatttcttaattatcatattttgcaaaaaccgatattactatctttaaagcaaaacgaggaatgcttctgatgaagaatgcttctgttctcaagataccgagatttcaggacattcctgagcctgagtctctttagtaaatgttatcaatctgttccattaacagtaaacatctagaggctaggaatgcctaacttcctggaaatgcagctcagcaggtcccagcctcctttttcctagccctcactcaagatggagtcgctctggttcaaatgcctctgacagtggcacacacctgtagtcccagctactcatggggctgagatgaaaggatcccttgagtctgggaggttgaggctgcagtgagctgtgattgtgccacggcactccagcctgggcgacagagtgagagactgtctcaaaaaaaaaaaaaaaaaaaaagacacaaaccaggcacagtcgctcatgcctgtaatcccagcactttgggaggccgaggtgggcagatcacctgaggtcaggagttcgagagcagcctgaccaacatggagaaaccccatctctactaaaaatacaaaattagccaggcatggtagtgcatgcctttaatcccagctattcgggaggctgaggcaggagaatcacttgaacccgggaggcggaggttgcagtgagccgagatcacgccattgcactccagcctgggcaacaaaagtgaaactccgtctcaaaaaaaaaaaaagacacaaaagggaggttctattaccttattttacagatggaaaactgaggcccaggaaagtaaaggaactgttccaagatacacagctaataaatggcagaggtggggtttgaacccacacactctgcagtttcaaagcttgttctctatgccataactgcccttatctttttcagcgtctcctcctgtgtcttgctttctctttctctctctctctctgttcctgtctctgtctctggcgtgactccatctttcttattcatttttccaacaagcatcctgccccaggtcgctctgtctgtctcaatcaatctctttttgtttaaacataaaatctacttctttttctgataaaattagccatgcatgttcagtggataaagcttgaaaaatacacaaaaacataaaagaaaaaaaacatcacctataacttcaccatcctcctctcatccctcatcccacttctggaacaaatcgtcccaatacataggaattttccatgtgtttatttgtgcatatgttttctgactaccaaagtaacacttgttccttgtaaaagattccatccatacaaaaacatacaacatggagagttaaagtaagtcttgtatttcacctcctggaggtaaatattttttaacaatttgtcactgttcctccttttgttttcctttctgtgagcaatttcacccaaattggaaccatgctgtatacagtttggtagctggctttttatgtcttaccattatctctcatttgcattctcccacatctttaattatagcgtatcagttagggcccagcaggaaacagatggcccgtcaatttaggataatttgaggtggggttgataccagaagcctttataaagcgattggatagtaaaggcaaatgacaagagctagtgcaagctcctggggccagcatgggtgaggggcctcatccacaggcctaaaggaaggggagagggttgagggtgtgcatgtggttgcctgacttggggaggagagagtcacttagatttgtggaggaaacagatgaattgtggtggcccagcacagggaggagccctggggaaaaaacacctgacctcctctcccctctacctggggcccagagtaggttggagaagcagggacagtagataaggaggggcaaacggaagacatcccccacccccacaccactattagagcttccattccagcaggatcatttaataaccaacccctgattggtagggtggcaggtttttcatttcctcaacagtgtcttttgcagagcagaggttgctttttgtttttgtttttttggacatggtctcagtctgtagcccaagctggagcatagtagtggcacaatcgccactcactgcagcctccatcacccaggctcaagccatcctcccaccccagcctcacaagtagctggggcgccagctacctgtagtaggcacgtgccaccaggcccagctaacttttctttttttccccagagatgcagtctcactttgttggccaggctggtatgtttccattccaacattcttgagatgacaaaattatagaaatggagagcagattagtggttgacagaggttaaggaaggggtcggatgggagaggagtggacgtggctactgaaagggcaacacaagggatcttgtggtatggagtgttttgtatcttgtctgtatcaatgtgatatggttaggctttgggtgcccacctaaatctcatcttgaattgtaatccccaggtgttgagggacagacctggtgggaagtgattggatctgatcatgggggtggttcccccatgctgtccttgtgatagtgagtgagttctcacgagatctgatggtgttttaagtatttggaagttcctccttctttcactgtctctctctcctgccaccatgtaagaggtgcctgctttcccttccatcataattgtaaatttcctgaggcctccccaaccatgcagaactgcgagtcaattaaacctctttcctttataaattacccagtctcaggtagcatcttcatagcagtataagaatggactaatacacaatgtcaatattctctatgtgatataataccatggttttcgcaagatgttaccattgggggaaactgggtaaagggtacacagtaactctttgcattcttttttttttttttttttttgcacgtttcatttgtttattgatttccgcctgattactccagaaggtaattacttaagatgcttaagatgggtgggggggtgatttcagcatcgcccaccttcacctgtgggaagacctccgagcatgtacagtaagacacacagtcatatcttggggagctctctgcaggtgaactgcaggcccccagccccatgctgggtaaagtaatgaagcaacagccgctttcctaagcccgagtgacccaagctacttctgcgcaggttgtgaaacagggtttaggtttctcccctcttggacaagaggccaggggtctgccccatcagcctgctttcctggtgggtcacggaccatcatcacctggctggtctggaagggtttaaccacagcggatcatgtggcgaccagagccggggcagctgtcaagggcagcctccatttccattctgtctcgtaagcagcctgggagatgtgggcctaagctttggtgaggatgagagtctgtcttgaaattgggccccacaggggtgagtccagaggcaggaccgggaaggaaaggtcgaaggtcgggcgtaacatcattcaaagaccagccacgcccagaccacacccctgagatgccttatcaggtgagcaggaggctaagtcagccgacagtgtggccacacagcccaagcctgtcctagcagaaggcaggaaccatcagcaaataagtgacttttccaagaaacaagatcttgttcagagctgcggccttgggagccttgatgtttcagccattgtgccctgccttcctgtctcaatgtccaggtctcgaattccatggtagaatggccagtgtgtggccttagtgccgtggccatctggggtcggtgtgggctgcccgcctagtgcgcctgggaagcagaagtttctttgcctttagggacaaacttcagcgagctgctgaatattcattcagaatcgggactgccgcagcttggggccatcgttcaggaacttgtggctcaacgtgttgccacacttgcacgagacaccttcaagacttcaggatgattgtgctctgggcgcttggccacgctgtcagaacggatggtcttggtgaacaccggccaggggaatgagtatgtgtactttgagcggctgggaaacagctcatagccacacttggcacacatatagacgcctggctcaaagtgattctggaaaaccttgcccccgaagaagctgcagaatgacatggcgccgccaggaccactgtgcacttgccccctccaacagacccaaggccgctgaccccatgaccactgggacccgcgcccacctccctgcacctcccaagaacctatctctttgcattatttcttacaattgcacgtgaatccacaattatgtcaaagtaaaaactctaattaaagcaatcatacagacatatttccttgggaaatatgatttcctaaatcatgatttcctaaatatgatttaggaatatgattcctaaatatgatttcctaaatatgatttcctaaatatgatttcctaaatcatacagacatatttccttgggagctatacatgcattatgcaaatatataaaatatggataatatataaaatgtttagaaatgtataaaaaagtgtgcaaggatatgtcccaaactgattaatagtgagttatttatcactggagagagcatgggaactgaggagatgatcactggaatatttaaatgtattagcaatattttaatttctttttttttttttttttttttgagacggagtcttgctctgtcgttcaggctgccgtgcagcggcatgatcttcgctcaccgcaacctccgcctcccaggttcaagcgattatcctgcctcagcctcccaagtagctgggattacaggtgtctgtaaaaattagccaccacacctggctaatttttgtatttttagtacagatggggtttcaccacgttggccaggctggtctcgaactcctgacctcaggcaatctgcctgcctcagcctcccaaagcactgggattacaggcatgagccactgcgcctggccgtattttaatttcttacaaggagaatgaattctgcctaactaaacagtaaaacaaacaaactcactggatatgagggaaatggtagctcactgcttcttcagttgctggtcgggtagatcatttgtgagactttcttaaaaagtacattaatccaatttctagagcttctctttttgtttttttgagacagagtctcgctgtgtcacccaggatggaactcagtggtgaaatctcagcttactgcatcccaggtacaagcaatcctgctacctcagcctcccaagtagctaggattacaggcacccaccatcacacctagctaatttttgtgtttttagcagagacggggtttcgccatgttggccaggctggcctggcactcctgacctcaagtgatccacccaccttggcctcccaaagtgctgggattacaggtgtgagagtccctgcaccaggagagactggcctctagagcttctgataatggctttgtaaaacgttgtccttatcctctgccactttgctgctgtgtgggtgttcactgacccctcctgatctgcacctctgaggcttgcctgccctcttgcttatggttggtgtttagccagtggaggtgctggcaggagattgagggagggcagagagcaaggtgggggtgtttattctcctatttgctggctgccccctgcaagtctggagttagacagtggccgtgatcctctatctacagccacagtctttgtcctgtcatgcctaggagtgctaacagctccccctgttacttgcctctgggtgcaccaccacctcttgtgtcttccttaaccctgcccacttttcccgtgcttaaatgttcaagtaggtcatctacttcctgaagatttctattttttttcccctgagttttcttaatagaaatgtttgagactgaggtcattaaagactcacatgctgctataagcaaaaattcaggctaggcttggtggctcatgcctatgatcccaacaatttgggaggccaaggcaggaggattgtttgagtccaggagttcaagaccagcctgggcaacatagcaagagcccatctccacacacaagatataaaaattagctgggtgtggtggcacccacctgtagtttcaactactcaggggcctgaggtgggaggatcacttgagcctgggaggtggaggctgcagtgagccgtgatggtgccactgcactccagcatggtgacagagcgagaccctgtctcaaaaagaaaaagaaagaaagaaatattagagattctgtgcaccctttatccagtttcccccaatggtaatatcttacaaaatgctagtccaataccgcagccggatattgacattaatacagtccacccatcttattcaaatatccccagttttacttgcattgagtgtgtttgtgtattcttgtgtgtgtgtttagtcatacagtttactgtatacaatttagttatataatttcatcacatgcttaggttcatgtatgcatcaccacagtaaagacagaagagttccatcaccatgaatatccttggggccatgccatctttttttttttttttttttttgagacagagtcttgctctgtcgccaggctggagtgcagtggcgagatctcagctcactgcaacctccacctctcaggttcacaccatgctcctgcctcagcctccagagtagctgggactacagatgcccgccgccacgcctggctaatttttggtattttttttttagtagagacggggtttcaccgtgttagccaggattgccttgatctcctgacctcgtgatctgcctgcctcggcctcccaaagtgctgggattacaggcgtgagccaccgcacctggcccttttttataaccacacccaccttcctccctccaccatctttccctaactccttgaaacaactaatttattctccactttcaaatttttctcatttgaaaaatgttatatagcccaggtgcagtggctcatgcctgtagtcccagcactttggaaggctgaggtgggaggatcacttagagcccaggaatttgagaccagcctggacaatatagggcaaccctgtctctacaaaaaatacaaaaattagccaggcacggtggcatgttgtagagtctagccccaatggcctgtgggttttttctttgtgtgcagagacgagagattgtaggaaaataaaaacacgagacaaagagatagaaggaaagacaactgggcccaggggaccactgccaccaatgtgcggagtctggtagtggcctcaaatgcctggacgcactgctatttattgtatacaaggcaaggaggcagggtaaggagtatgagtcatgtcaagtgattgataaggtcacgtgagtcacgtgtccacatgacagggggcctttccctttgtggtagctgaggcggagagggaggacagcatacgtcagcattttttctatgcacttatcagaaagatcaaagactttaatactttcactaattctgttactgttatcttctaagaactcaaaaagaggagccaggtgtacaggcggaacatgaaagtggacaaggagcgtgaccgttgaagcacagcaccatggggagacgtttaagcctccagatgactgcgggcaggcctggctaatgtcaggcctcccacaagagctggtggagcagagtgttctctaactcccccagggaaagggagactccctttcccggtctgctaagtaacgggtgctctcccaggcactggcgctaccgctagaccaaggagccctcaaacggcctttatccgggcgtgacagagggctcacactcttgtcttttggtcacctctcacagtgtccctttagccctgactctgtacggcctgttttctcctaggttataattataaaacagaaattactataataataaaacaaagagtaatactacaaactaatgattgataatattcatatataatcatatctatatcctatttctagtataacttttcttattataattattttctttattatactggaacagcttgtgccttcagcctcttgcctcggcacctggatggcttgccgcccacagcatgtgcctgtggtctcagctactctggaggctgaagtgagaggattgcttgagcccaggaggtcaaggctgaagtgagccatgattttgcaactgcactccagcctaggtgacagggcaagactctcaactttaaaaaatgtgtgtgtgtgtgtgtgtgtgtgtgtgtgtgtgtgtgtgtgtgtatgataatgaagtagtatgtaaccttctgggatgggcttttttcactcagcataattctctggatattcatccaagttgttgcatgtatcaatagttcattcctatttgatggtatatatttgccagaatttgtgtaatcatgcaccttttggaggacaactgggctttgtagtttgggctattacaaataaagttgctgtgatcatttgcaaagcaaataactatgttattgcatggacataggtttccatttctctggaataaatatccaggcataccattctgggccaactaggagttgcatatttagttttacaggaaactactgaactgtgtttcagaatggctgcaccatttttccattcccaccagcaatgtatgagtgatccagttcctagatcatttttgagttatactcacaaataaatgttctccaaagctttttattatttcttaaattcctgaagtagtgtttctaacagactaggggtctcaagcagtggatcacaagacacatttctattgggacagcattaaattgaattttttattgcacataacctgctctgtggtggtcagagctggatcactgattgtcaataatttgcatctggcgctttcctccaaccaatctatgacactccgttctttctgccattactaattttccttctagttcttcagtctttggacatatataattttatttcggcctcatggtatctatcagttaggacacttttggttgtaaataaccaaaaactcaactcatgctggcttgaacactggagaatttttgagcttacaaaactgagaagcctagggttagtggtgaggcttcaggttaagtttgatctagcagcttaagacatgagtaacctcccagttggttagttgtctgtttgtttgtttgtttgttttttgagatggagtctcactcagtcacacaggctggagtgcagtggcatgatctcggctcactgcaacctccgcctctagggttcaagcaactctcctgcctcagctccctgagtagctggggttacaggtgcacatcaccatgcctggctaatttttgtatttttagtagagacggggtttcaccatgttggccaggcctgtctcgaactcctaacctcaggtgatctgcctgcctcggccccaaagttctgaggttacaggcatgagccacggcacccagcctcagtttgtttgcttgtttgtttttaaatatttcaggtctcccttatgctgatgagaagcctgtttactcttgtaaatccaacatgggtctagcagcatcccaggcttcaggcttcaggttttatttttcttcagtagataaaaaaaaaaaacaaaaaaacagcatctttttcccaagatgttcaggaccgaagatcattctgattgaactggattaggtcacatgcccaccacaaacccaatcactgtggctaagaagacaaactgatgtaaatggctacagccagatcacataccccatcccagggatggggagggggctaaatcatcttcccaaaactatttagctccccaactgaaatgggggatctcaggaaagactggggagaggtgatagaagcttggaaattatattccatggacactttttgaaatcttttttttttttttttttttgagacagggtctctctctgccacccaggctggagtgcagtggcacaatctcggctcactgcaacctccccatccctggatcaggcagttctcctgcctcagtcccctgagtagctgggattacaggtacgtgccacctgaccagctaatttttttatttttagtagagacggggtttcaccatgttggccaggctttgctggttcttaaaacctctatgcctttgaataggaaaatatgcactggcaaaccataaaataattttctcatactcatgctgaggaagacatataaccatgaaaaacagtcactacttacccataattatcaatatttatataaacctaattagaattaattaaaagtggtctcaagtaggaagcgtgcctgacttactcaaaacatacctagggctgggtgcagtggctcacacttgtaatcccaacactttgggaggccaaggcaggaggatcgcttgaggccaagagtttggaccagcctgggcaacatactgagatcctgtctctacaaaaaatttaaacactagctggcatggtggtgcatgcctatagtctcagctacgtgggaggatcgcttgagcccaggaggttgaggctacagtgagctgtgatcataccactgcactccagcctgggaacagagcgagactgtatctcaaaaacaaacaaaaaacatatgtaggctattctgtatgggatagatcagtcatacagatgagagatggcagagtattgccaataataacccagggagcctgggatcaaatccccatttcacacctacaagctgtgtgagctcgtgtttcattcataacctctctgtgccaccgttctttcttctacaaaatgtcagccaataaccagtcaactacctaacagttgctggggagaaaaaaaaaaaaacagatatttacatgagaagagcttagaatggagccaggaagtgctgagtatatattagctatatatatatatatatacacacacaaaacagtagttgagaaaaacatgtctgtaattccaattttcaacagcaaactaacaatactttattaagtggtaaacaaataaatattatattcatataacaatatgaaagccagagatagctcgtctgagacacagatgaacaaaaaccagagagagggggccaggtgcagtggcccacacctgtaatcccagtgctttgagaggccaaggtgggatgacagctcgaggccaggaatttaagaccagcctgggcaacagagtgagacccccatctctacaaaaaaaaaaatagaagaattatctgggcatggtggtgggtgcctgcagctccagctgcttagggactacttaaagctgaagcaggaagatccttggagcccacaggattgaggttacagtgaactgtcatctcaccaccacactccaggctgggcccagagacagtgaagccctgtctctaaaaaagaagaaagaaaagaaaagacaaacaaacaaacaaacaaaaaaaaaaacagaagagaagggggagtattcagggtgtaaaccaaaattaaaattctaaggccccccgcaaccatctgaatggatcctgtcctctccgccaagggcattccaaagttaacctgaaaaaccagttcgggccataattgcaagggggagtgggacgtgcctcatcatagcctcctgctttttggaattactgatagaagagaactttaagtctgattttttttaaaattacaatctattttctctgaagcctgctatctggaggcttcatctgcacacacactcaatgtaagtaaaacaggatatctgaataagataggtggattgtgtcaatatcaatatgctggttgtggtattggactggaggtttgtaagatgttagttaccattaggagaaactgggtaaagggtgcacaagatctctgcattttcttcccttccttccttccttccttccttccttggtctccacaaccccttatggtaacccagaccttcctttctattgataataactcaaccaattgcccatcagaaactctttgaatccccctatgacttggaagcacaccctggcttccacttgtcctgcctttctggatggaactaatgtacatcttacgtgcattggttgatgccttatgtctccctaaagtgtataaaatcaagttgtgggccaggagcggtggctcacgcctgtaatcccagcactttgggaggctgaggcgggcggatcacctgaggtcaggagctcaacaccagcctggccaacatggcaaaaccccatctctactaaaaaggcaaaagttagctgggcatggtggtgcacgcctgtagtcccaactacttgggaggctgaggcagaagaatcacttgaacctgggaggttgcggttgcagtgagacaagttcgtgccagtgcactcaagcctgggcaatagagcgcgactccgtgtcaaaaaaaaaaaaaaaaagttgtggccggacaaccttgggcacatggttctcaggatctcctgggggctgtgtcacaggccattggtcactcatatttggctcaggataaatctcttcaagtgttttttagagtgtgactcttctcattcattgacaagggaaagaaagatacaaagacagggacagacaaacagaaatgtaatgagaaagcagagaaagatgaaggagacagcatgggaaagccagttgtgaacacccgatggcaggcatttaaatgatttggtagctctgccaagcctgtagcttcaaagaaaaggaaaaagtgtctcggttcattcctagagtacagaagacagatcagacagaggcaaagagagacaaacagatgtccagaaaacagacacaggcagttggctcaggatagagagttggaggccagccgtccctggcataggcccaccgtgggttaaagtcctcacaccccgactgggatcccagagggctggggccagcagtgacgttccgaaatcttgtccaggacggggaccggctgcaaaccctctcagccctgcacataaaagccagcatggtccgtcgaggcactgttgcccaggtggagactgctccggacgccccccaggggacagtggccggcagcacctgctgcagcacgaggcacagagggtgcactgcagggagaagtgagggcagaggccaaggcgaggagggggccggctcccgctctctctccctctgtgtgtgctgcgcctcccctgtgagcctaacccaaggcaggggactggacgcgtgggaccctctctttggcctccctgacgtccctcaggagcagagatgcgaccgagtgtgtgggccgcggtggccgcgggactgtgggtcgtgtgcacggtgggcgcggcgatccgccagcgctgcctgctctcgcactaccgctcgctggagccccggacgctggcggcggtcaaggcgctgaggaaccgctaagtgagtgaccgcccagcccttgcgccccccggtacactggccccgccgggttcccacacacccgtcgctgacccgaggggtcctgcgtcctagcgcccagcaggcgcctcttgtacgtcagagcccacagttcccaccacgagatccccgcagtccccgtcgtcagcgcgaacgcaggctcagggtcagtcacaaaaggagccctgcagggcggactcggctccaggtcgcgggcgcagggctatgccgggggagagcgggatgcaattcaaccctggttcacgccttcggggagctccctggttcagtacacgacaggcacgaccgtacgctgccagtacccatccacgtccaggaatcccagactgtgcagaggttaggggccctggcgagggggcccagtcgtatgcgataagcgccgcttgtcccgcaggcggaagaggcgctgagttggaggtcgcgcaactgctccgtccgccccaggagggatcctccgcggccatcggtgaggcccagaagcggacgggagaggcatggcctgggcgctgccccctctaacgccctctagtccccgcagtcctgcgctcggctccgccacgtggccaggagcatcgcggacgcccaggcagtgctcagcggcctgcaccgcctggagctgcttcccggcgccagccggatcctggagcccctggcagccgcggggagggacgtggcggcctgcgtgagtgacggccgcgccccgccgcccctcgcccccgccagcttctctgcatcctcaggcccatggcgagccccagcgctttgccaatctgtcctgcttagcggaaaaaccgatccagacccaggtcgggtcctctgggtgtcctcaaatccgggctcgggtctgcggctgggagggcctcgggcagatgcagagaggggctccgtccttcgccttttccatttgcctcgcgtcccacctccagctggcacggccaggctcctccaggaaggtccccggggcccagaggaggcgtcacaaaccgcggagagctgtgagtgcagcaggcagtacagggttagcctgcacggaggaccgagtgaggttgacacggacagcactgaggctgggagcggcgggattggagaggtcttctcgggagggaagagcctggcttagccccgctgccctccctccctggctccaggactcccctcggtgtcgcgaagccagcgtgatcttcaacctcctgcgcctgctcacgtgggagctccggctggctgcacactcagggccttgcctctgaccccgccccctccggcagcacggaaacctccacgccattggctgccgaaagaggtccctgtcgcccattgggccggccaggcgaggatctcagccagtgggtgctgaggcacgagaacttcttcgcagccttgggcctgacttggatccactgtctcagatataagaggagcgggtccttctacagggaagagaccacagttctccaggaagccacgatatttcctcggggtgcattgtacgaccctccaacggttgctatggcaggaaaaaacttgagctctggaaaccgtggctgaccccaggcaacagggaccagttcctccttgtgtggttaccaggacacccccaacaccaggtcctaaccccggatttgtagccccacagccagctttgagattctgtgaatccgtgactcttggatccggcatctaagggacaccaatccatgagggatttggtagtgaaaggcccaagggtccttaaccgactgtggttctttggattcccttacgtgtgtttgtatttgtgaagttcctgtgcatttgctattctgtctcccggtttaaatttattgccagttatcaaagagtgttttgatcgcattggttgttttccgtatgatgattgtgaggtgcaccttacagcaaaaaaagaggccgagccagggactcaggtggcctgaggttcagttctgaccctgccagttaattacagtggaattcagggcaaattacttttctgagcctctgtttcctcacctataggatgggttagcatacttgccttgtggaggagtagtgtccgttgagatcacgttttaaactctccaactgaggtcctagtatggtcttaatgagtggattctattaaataatcactcacataaatacacaaacaattgtgttattaattttttctccaaatctgtgcattagcaatctgcgttgctgaatgcacccctccttgccaaggtcacacggctagtgagggtcagaaccaggtttgaaccccagacccttcatctccaagacccatgctcttcaccactgcctgaacttccctaagaaagacggcacccacgtggtgtccttcaagtccttcgtcacacctcagttcttgagcagagcctcatattcctgagtccttccttgcctgggcaattaagaaatattggccttggctgggctcagaggctcatgcctgtaatcccagcactttgggaggacgaggaaggtggatcatgaggtcaggagttcaagactagcctggccagcatggtgaaaccctgtctctactaaaaatacagaaattagctgggcatggtggcacatgcctgtaatccaagctactcaagaggctgaggcaggagaatcacttgaacccaggaggcagaggttgcagtgagctgagatggtgcctctgcactccagcctgggcaacagagcgagactccatctctcttgctcactcactctctctcatgctctctctctctctctctctctctctctctctctatatatatatatatatatatatatacacacacatatatgcctctggccgggcgcggtggctcacgcctataatcccagaactttgggaggccgaagaaggcagatcacgaggtcaggagttcaagaccaacctggccaatatggcaaaaccccgtctctactaaaaatacaaaaattagttgggcgtggtggtgcatgcctatagtcctttctactcgggaggctgaagcagaagaatcccttgaaccaaggaggtggaggttgcagtgagtcgagatcacgctgctgcactccagcctgggctacagagcaagactccatctcaaaaaaaaaagaaaaaagaaagaaagaaagaaatcatggcctctgggcacagtggctcatgcctgcaaccccagcaatttgggaggccaagacagacagatcacttgacgtcaagagttcgagaccagcctggccaattggtgaactgtcatctctactaaaaccataaaaattagctgggaatggtggcacaaatctgtaatctcagctacttgggaggctaaggcaagagaatcgcttgaacccaggaggtggaggttgcagttagtcaagattttgcactgcactccagcctgggtgaccgaacaagaccctgtctcaaaatatatatatatatatatgccaggaggggtggctcaggcctgtaatctcagcactttaataggctgggtgaggaggatggcttgagcccaggagtttgaggctgcagtgagctgtgatcatgccattgcactccagtgacagagtgagaccctgtcttaaacaacaacaaaaccagagcaggtggaatcctcctgggaacataccttcctgtaggttacccctgagtctccatcagtttctctttccctccagctgctcatctggctcactagccctgccctgctctgggctttcccagcctggggctcccctggtggccggtgtcttacctgaggctgtgttttcacttttcctacatcagctgggactgcccttctgtcagggataaaagctgccccatggagctcaggcaggaattacatcccagacagagctcaaaactgacagaaagagtcaaagccaggacacagtctgagatccagaagaggggactgaaaagaacagagactccagacaagacccaaacagaccctgggtgacagcctcagagtgtttcttctgctgacaaagaccagagatcaggaatgaaactaggtgagtcccacatctctgtccgtgctcagctcctgcagcccctgccctcagtgggcagcctctccatcccctcagctccctttctctctgtgacacagacatgactggggactgcacgccagtgctggtgctgatggccgcagtgctgaccgtgactggagcagttcctgtcgccaggctccacggggctctcccggatgcaaggggctgccacatagcccagttcaagtccctgtctccacaggagctgcaggcctttaagagggccaaagatgccttagtgagtctccccctgccctcctgccatggactagcctccacccccactccaagcgtcaccatgctttcccactcccagcttccttcactgggctagcctccaccctccctgcagtgggctatctcatgctcctactgtagggactgactcatgttttcctgtagaagagggtcctctaccatcctcccagcagttaacctcccctatcctgttgtcagccatcctccaatcccaccaggatggtctaacctccacccctcctgctggggctaacctgtgcctttgctgtctaggaagagtcgcttctgctgaaggactgcaggtgccactcccgcctcttccccaggacctgggacctgaggcagctgcaggtgagagggggagtcaggcccacccctgctctcccagccccactcacctggctctgtagtggccccttcaccgtctctttctcccttgtctctctctcttctcctcacacctgctctcccttccctccgctcccacctgaccacactggctgtgccctctcccctgtgcctgtcaccttcacttgttcctctctatcctgctccccaacctgttcccctcacctcccccctcacctgctctttctcacctctcctcaggtgagggagcgccccatggctttggaggctgagctggccctgacgctgaaggttctggaggccaccgctgacactgacccagccctggtggacgtcttggaccagccccttcacaccctgcaccatatcctctcccagttccgggcctgtgtgagtcgttggggcctgggcacccaggtctgtgagctctgagcagcgtccttccccttgccaaggccccggctcacacaccgccctcctctgcccacagatccagcctcagcccacggcagggcccaggacccggggccgcctccaccattggctgtaccggctccaggaggccccaaaaaaggtgagtgacccgggaagagagggactgaggtctggggagccactgggagcccagaacccagacagcccctgacccatcccctcctccctacaggagtcccctggctgcctcgaggcctctgtcaccttcaacctcttccgcctcctcacgcgagacctgaattgtgttgccagtggggacctgtgtgtctgaccctcccaccagtcatgcaacctgagattttatttataaattagccacttgtcttaatttattgccacccagtcgctatttatgtatttgtgtgtgtaaatccaactcacctccaggaaaatgtttatttttctactttttataacccttgttgaaataaacaaaggaaaagacactcatgacgttggactgtgtgtctgttggtgtgtatttcctttgtgttgctgccataacaacgctaaaagtagcatcttccaaagacacacttgatgagctgggagtctgcaggtcagaggctcgctggccctggctggtttctctcctgtgggactcacaggctagaatccaagcattgctgctgggctcttactgggagctctgaagagaaactctttccagggtcagtcacattgttggcagatcactgttccttgctgctgtaggactaaggttcctgccccctcctggctatgggtccatcctgagctgactctgctgaagggttctccactcctctcactaagctaacctctaccctccctgcagtgggctatctcatgctcctactataggggctgattcatgtcctcctgcagtggagggtcctgtaacatcctcccgggagttaacctccactatcctgttgtcagccatcctctaatctcactggagtggtctaacctccaccccttctactgggggctaacctgtgcccttgctctctaggaagagtcgctcctggggatggatggcaggtgccgctcccgcttcttccccaggacctgagatctgaggcataatacataacgtattctatccctcatgacagtggaagacagaataatttcactgccctgaaaattcactgtccttccccattcatgcttatctggctgtctgtggtccctactaataggcccttccaactcagagccaggaacagtgcttcaaacctttctcatgcttggaacctctctgacctctcctgccatgttgctcttgtacttccagctagagaaagtcttccacgtttcagggctcaggtggttagtttggcatccagggtgatctccccattgtcaatccacatgccataatcgcatctgcaaagctcctttgccgagtaacataagatatgcacagggtccagggatgcggtgctgggtgactttggggtggcatcttcggcctcctacagtgtgtgtatgattgtgcttctgattgtgcgtcattgtagttatgggattgtgtgtgtgcctggtctacctgagagtgtatgagggatcatttagaatgcattgtgctataagtaaagtaacagaagctagaaatgccttggtaataagaactttcatcagcatccatggtgagacatctagaacagcaggttcattgagggctgtgctatccactggagtccgcgggccacatgtcactatcgagcacctggaatataggtggtgcaacctcattttttcagtgagtgtaaaacataccccagaatttgaagatttactgtgggaaaaaaataatgtaaaacagctcgattataatttacatattcattagatgttgaaatgatagcactttggatgtattgggtgaaatgaagcatctttaaaattaatttagagcctggatgtgattgctcaagcctgtaatcacagcactttgggtggctgagttgggaggatcacttgagcccagactagcctgggcaacatagcaagatcctgtctctataaaaaattagagaattggctgggtgtggtggcacaagcccataatcccagctactggcggaagctgagatgggaggactgcttgaggtcaggagttcacgaccagcctgagcaacagcaagatcctgtctcttgcgtgatcacatctcactgtagcctcaaactcctgggctcaagtgattctctctcctcggcaccatcctccaccctctccagcccctccccgaactgggattacaggcttgagtcaccgggtccagcccattctctttccaagaagcccctgaattgtataagcaagcatgaggtctcactaaccctggatcggcccccacaaatgagggggacaacttggatcagggacccctgctgagtagagttggctgagctgctggaacaaagagtcccccaaatacagtgatcatgaattacaaaccacagagtgtcattctccaccagctcctcctcccaaggtgagcgctccccctggcaggatggccccactcagtcatccaggggccctagttcctggcagttctgtgctccacagtccccgggacagggctccctcatcatcttcacccaccggacctcacggcagccttgaaaagcctacggacccttctcagaaggaaagaacacgtgcaggacaaaggaatccaactctgattgtaatacagtgatcaaaatattttttcacactgtgacatagcaattcatgtgcttcttcatgaatgcattaagtaaaaaatcacctgtggcagctttaataaccactgtgacttagaagcagagatgagcataaatgatatttcaaggtgcctgctggaagataacgtgataggaaatgcctgtgatttcttttggtaacaaagtcacaagttctgctaacactgttgtggtgtgttgctgcatttgtaatggattcgtgctagatgcaagactggtccccagagatgttcctgattcttggacctgggaatatgttatgttccatggcacgagggactctgcagatgtgagtaagttaagggtttgggatgggggcgttatcctgggttgtccacctggacccaatgtcatcacgaaagtccttctaagaaggaggccggggtcagcatcattagcggaagatgtaaccacagaagcaggatgttggagtgatgtcagcaagggaaccggggtcaagggatgctggacacccccagaggctgagaaaggagagagatctcccctgctgcttccagaaggaacccgctctgctgacgcctgaagcctcacgagtgggatagaaaacaccagtagaagaaccagctggccacctgagaatcttgagaaattacaaatcactggcaattgttggggggagcggctgttgttttgttctttttggggtttcttttgcttttttgaaacaaggtctcacttctgtgtgcagtttgggccaaagtagctccaggacaggtgtacgggacaaagagtgggtcatcagttcaataaatagccagcccagccaggtgtggtggttcaagcctgtaatcccagcactttgggaggccaaggcaggcagatcgcttgaggtcaggagttcaagaccagcctggccaacatggtgaaaccctgtatctactaaaaatacaaaaattagctgggcatggtggcaagagcctgtaatcccagctactcgggaggctgaggcaggagaatcacttgaacctgggaagcagaggttgtagtgagccgagatagtgccactgcactccagcctgggtgatacagagagactccatctaaaataaaataataaaaataaataaataaaacttgtacgaggccggggcagtggctcacgcctgtaatctcagctatttccaaggctgaggtgggaggatcacttgaacccaggagttctagaccagcctgggcaacatagtgagactctgtctctaccaaaaacaaaaattagccaggggtggtggtgcacgcctatagtcccagctgctcaagaggccgaggcaagaggatcacttgagtccaggagtttcaggccacagtgagctatgatcctgcctctgactccagcctgagcaacagaatgaaatcctgactctaaaacaaacaaaatactaatgtatgctacaacataggtgaaccttgaaaactctgtgcttgacctctgatttgggggaagaaaaaaagagcaagaaaggccaggcgtggtgactcacgtctgtaatcccagcactttggaaggccgaagtgggtggatcacctgaggtcaggagttcgagaccagcctagacaacatggtgaaatcccatcttactaaaaatacaaaaattagccagatgtggtgactcatgcctgtaatcccagctactcaggaggctgaggcaggagaatcactggaacccaggtggcggaggctgcagtgaactgagattgcaccagtgcactccagtctgggtgacagggcaagactccatctcaaaaaaaaaaaaaaaaaaaagcaatgaaataagtaaataaataaaagaaaaagaaaacactatcctgagtgaaagaagccaggcacaaaagaccacacattatatgattcaatttatatgaactattcagaataggtaaatttgtagaagaaattcacagaaagctggccaggcacagtggttcacacctataatcccagcactttgggaggccgagaccgtcagatcatttgaggccagaagttcaagaccagcctagccaacatggcgaaaccccatctctactaaaaatacaaaaactagctggacgtggtggcaggtgcctgtaatcccaaatgctcgggaggctgaggcaggagaatctcttgaacctgggaggcggaggctgcagtgagccaagatcacgccactaaactccagcctgggcaacagagcaaggctccatctcaaataataataataatataaagaaaatgttcagctgaattaaatttaaagaagttcagttgagtaatgaatcatttgtgaatcgagcagcccccagagtcacagaagattcagactccagcacggtctcgtgatcagaacaaattcatagacagaaaaagcgaagtgacgtatggaagttggaagttttgtacagaaacagctggataggctgcaggctggcgtttgccttatttgaaaacagttcgaacacttagcaatctatgagtggttgaagtatggccgctgggattggccaaccctcagctattgttatgggcacatactcctaaattaggttttcaatcttgtctgcctattaagctaggttacagttcatccacaaggactcaaatatagaagtacagagtctccttctcaggccatatttagtttgctttaacagcttcataatctgcctctctgccctcgccgatcatctgtgaacttcccaatgcccttgactgctcaaattagccagtgtggactctatgctaagagccctgacctatgcagccaggaatgggctcttaattcatgaaacagcagtgcaggttaagcacagtggctcacgcctgcagtcccagcactttgggaggccacggcaggaggatcacttgagcccaggagtttgagagcagcctgggcaacatactgagacctcatttctacaaaaaatataaataaaacttttttaaaaaatagccaggcatggtggcacccacctgtcatcctagctactcaggaggctgaagcgtggaggctcgcttgagcccaggagataaggctgcagtgagccatgatcatgccactacactccagccttggcaacagaacaagaccctgtctcagaaaaagaaagaaaggaacagcaatgaggccagtgtgatggagctgcgagggggagggtccagacctccaagagctttgtaagggaaggcaggggttggatatttttttctaagcagaatgggagccacaagatggttttgaatagagcggggatgtaatctctgactgtaggtgggaaagagggtgtgggagtgaggggtgaccaggaggaagctgctgtgatcatccaggcaggaggtgacagtagacaggtagatgagatgtatggggagggtgagaagtgcgtgaatttggaaacgctttgaaaatacagccagtggaacttactgatgaattgaaaatgatgtggtattgtgtatgtgtgtgtgcacatgtgcatgcaggcgtgagagagagagaaggatggcctgatggttacaatgaagcctcaatttcatcagtggaaaaggagaacaatactcactgccgaggcttgttgtggggaatctatataattgtgggtgtaaagcacttagcacatttcatgaaatatagtcactgtcatcattattcattacgagatgtgttctaaggtaagcaggtctgtgcaaacctacccccaaaggccaagggagaaagagcctgacaaatccagtttctttttttttcttcttcttcttcttttttgagacagaatctcctgttgcccaggctggagtgcagaggtgcgatctcagctcactctgcctcctgggttcaagcaattctcctgcctcagcctcccgagtagctaggattacaggcgcccaccatgacgcccggctaatttttgtatttttagtagagatagggttttaccatgttggccaatctggtctcaaactcctgatctcaggttatccgcccaccttggcttccctgagtgccaggattagaggcgtcagccaccacgcccggccgacaaatccaatttcttagaaggaaacgtttaagaggaattcacaaaccgaagccatgtctcaggaggccctaggaagacagaggggatcccccacacagttatcccacaaatgtagggcttatacactataggaaatttgcctcaaggcaggatttatggtaagtatgtgtttatgataacataaaggttattttgacctaagggcaggatttttggtaagtacatgaaaatagaaatcttagaggcattcccagaactggagttaatcagaagtcaacatgggcctgaatctcagcactttgagaggccgagaatggaggatcgcttgaccccacaagtacaagaccagtctgggcaacatagtgagaccccgtctctacaaaaaaatttaaaaattagctgggtgtggtggtgaaggcctgtagtcccagctactcaggaggctgaggtgggaggattgctggaccctgggaggtcaagatgcagtgagccatgatcgtgccactgcactgcaacctgggcaacagagcaagactctgtcgcaaaacaaacaaataaaaaagaagtcaagatggcagattagcatccaagatggagttactttaatctcccctgggtgtgtttgtcattgttgttgttgtttaagacacagtcttgctctgttgtccaggctggagtgcagtggcatgatctcagctcactgcaacctccacctcctgggttcaagcaatctcctacctcagcctcccgagtagctgggattacaggcacgtgccaccatgcccagttaatgtttgtatttttggtaaagacagggtttcaccacgttggccaggctggtctcgaactcctgggctcaaatgatccacctgcctcggcctctcaaagtgctaggattgcagcacccagcccactgggtgtgtttgagacaagtcaaccaaacccatcgtgtttcttctggcagctcccgcaaaactgtacatgtgccccctaagattccaagaaagacctccaccatgccccaattgcttcaaaaacatctgcccccaactcgtttgtgctttcaccactgctaggaaataggggtgactcagggcgatttcctctcctttcaccactctatgggttctgagggttttccgtcagggatctctttctagaagaattccaagctctctgctctagcctcctttctgtttctctttcgaattcagtctgtcctctgtcatctcctgaccactgcgtatctgagcttccccagccctgccctggcggcacattccaatttcaggaggtgtgtttgcttttctttcttcagctgggattagccaatccagtggttcatggcccttgcttgcttcataatcacctagggaactcaaaagatgtctggcctgcaatcccagagatgtgattggttttaatcattacattctatcagtgattcctaaactttaaagcgcatcggaatcagctagagtcttgctaaaccgtagaaccaacctcattggcaccaccttggcagagtgttagaaatactgaatctcaggccctagcccagacccactaaatcagaaatgtgcaggttaggctggcacagtggctcacacctgtaatcccagaactttgggaggtggggtcagggagattgcttaagcccaggagtttgagaccaacctgggcaacacggtaaagccccatctcaataaataaataaataaaccatgtgtggtcgagtgcacctgtgatcctagttacttgggaggctgaggcaggaggatcacctgagcccagggaggtctagtctgcagcaagcagtgattgtgctactgcactccaccctgggtgacatagtgaaaaccagtctcaaaaaaaaaaaaaaaaaaaaaacagaaaaaagaaaagaagtgtgcactttaacaatatttccaggtaactctacacatgtgaaagttgaagaagcactgggctcaacccctgactgctgtgcagctgggggtagaccaggtggagtgggcctgccagcttgccttgcagaacctcagatcccacagccagatcccaaccccactgtaacctccatttcctacacagccttctctgaacgctcctcccacctctgcctatggagcatcataataataataaataatattttaataacaaaatggcaaaagtttatttggtgcatctcctatgcaaggaattaaatgaattaagttaattcatttaatccttactaccaccttaggatgtaggtcttacaattagtcccactttacagatgaggacccagagcatcaagatgcatccggccaggcgcggtggctcacgcctgtaatcccagcactttgggaggccatggcgggcagatcacaagatcaggagtttgagaccagcctggccaatatggtgaaaccccgtctctactaaaaatacaaaaattagccaggcatggtggtgtgcatctgtagtcccagctactcggaagactgaggcagaagaattgcttaaacctgggaggtggaggttgcagtgagccgagatggtgccactgcactccagcctgggtgacagagtgaggctctatctcaaaaaaaaaaaaaaaaaaaagaagaagaagatgcatccagccgggctcggtggctcacaggcaacatagccagaccctgtctctacaaaggtaataatactaataataataatcataggcaggcacacctgtagtcccaactacttgagtggctgaggcaggagaatcacttgagcccaggaaatggaggctgcagtgagctgtcatcacaccactgcactccagcctgtgcaatagagcaagaccctatctcagaaaaataaataaaatattatagacttacaagaagttgcaaaaataccacagaagcgtttcccatatccctcacccagcttttcctaatagtaacatcttgcataactatagtaattctcaaaactaggaacctgacattgtcacaatactattcactcaactacagactttaccgggatttcaccagtttttgcatgcactcatttctttctgcatgtctttgtgtataattcagtgacagtttatcacaggtataaatcccataatcaaaatacagaattgcttccttactacaaagaaatgtacaagtcacacctttacagtcacatcctccctctccttctcttacccttgacaaccactaatctgttctccagctttgtaattttgtcatttcaaggatgttatataaatggaatcacatagcatgtcacttttttttttttttttgagacagagtcttgctctgttgcccaggctggagtgccgtggtgcaatctcggctcactgcaacctccacctcctgggttcaagcgattctcctccctcagcctctcgagtagctggggttacaggcacgtgccaccacacccggctaattttttgtatttttagaagagatggggtttcaccatgttggccaggctggtctcgaactactgacctcgtgatctgcctgcctaggcctcccaaagtgttgggattacaggtgtgagccaccacgcccggccagaatgtcactttttgagaccgacttttttccccactcagtaaaacatgcttaaaatccatccaggttgtgtgtatcaatagttgaatcctattaattgctgaaagtaattgtggtttttgcattgttgaaatttgtcatttgatattggaatacattcttaaataaatgtggttatgttatacatcattttaatgtccatttcttgctttatgtttttttgctcatgacattacttgctgttgattttatgtttactttagactatggaaattatattaggcagaaagcaaattcaggcaattttcttatttgggttcaaaacgggttgttaagcagcggagacaaatcgcaatatcaacaacacatttggcacgggaactgctaatgaacgtacagtgcagtggtggttcaagaacttttgaaaaggagaagttttgccttgaagatgaggagcatagtggccgccgtaggaaattgacaacaaccaactgagaacagtcatcgaagctgattctcttacaactacacaagaagttgccgaagaactcaacgtcgaccatggaccattctatggttgttcggcatttgaagcaaatcggaaaggtgaaaaagctccataatggccaggcgcagtggctcacacctgtaatcccagaactttgggaggccgaggcaggcggatcacctgaggtcaggagtccgagaccagcctagccaacacggcaaaaccctgtctctactaaaaatacaaaaattagctgggtgtggtggtgggtgcctgtaatcccagctactcaggaggccgaggcaggagaattgcttgaacctaggaggcgtaggttgcagtgaaccgagatcgcgccgctgcactccagcctgggagacagggcaagactctgtcacaaaaagaaaaaaaaaaaaaaactcggtaagtaggtgtctcatgagctgagcgaaaattttaaaaatcgtcattttgaagtgtcatctcttattctatgcaacagcaacgaaccatttcttaatcagattgtgacgtgaaatgaaaagtggattttatacaacaaccggcaacgacccgctcagtggctggactgagaagaagttccaaagcccttcccaaagccaaacttgcaccaaagaaaggtcatggtcactgtttggtggtctgctgcccgtctgatccactacagcgttcggaatcctgacgaaaccattacatctgagaagtagcctcagcaaatccatgaaatgcaccaaaaactgcaatgcctgaagctggcatcggtcaacagaacggacccagttctccacgacaacgcctgactgcatgtcacacaaccaatgcttcaaaagttgaatgattgggctatgaagttttgcctcatccaccacattcacttgacctctcgccaaccaactaccacttcttcaagcatctcgacaactttttgcagaaaaaaatgcttccacaatcagtaggatgcagaaaatgtttcccaagaactcgtcgaatcccaaagcacaatttttacggtacaggaataaacaaacttatttctcattggcaaaaatgtgttgattgtaatgtatcatattctgacttataataaagatgggtttgagcctagttataatagtttttaaaattcactgtccaaaactgcaattacttttgtaccaacctaataatattctcttgcatggacgtgccacactaaccattcacctgttggaggacatatgagttgtttccagtttgggactatcacaaataaagctgctatgaatatttgtatcagctttttgtttggacatacatattgatgtctctaggataaatgagcaggagtgtggttgctgagtcatgtggtaagcacacacttaaatttttaagaaagtgccactgttttccagaatggctgtatcattttacattttcaccagtggtgtgtggaagactgggtttcttcacgtcctcagcagcatttggtcctattggtattactgttactcattctaataggggtgtactggtatctcatcttggttttaattcacatttctctaatggctagtgatattgacatattttcatgtgtttgtttactatctgtgtatcctctttgactgtctgttcatgtcttttgcccatttctattggattttttcttgtttttatggatgagttttgagaataatatatatttttttctagctactattccttgttgaatacatgatttgtaaatattgtcttccagccagtgtcttgttttctcatcctttaacagggccttttgcagaacaaaagttattaattttaataaagtccaattgatcctttttttgttttagagacaggatcttgataaagcaatcctaccacctcaagtttccaagtagctaggactacaggcatgtgccaccatgcccagctaatttttttatttttgtagaaacagtctcactggctgggcatggtggctcacgcctgtaatcccagaactttgggaggcagaggcaggtagatcatgaggtcagaagatcaagaccatcctggccaacatggtgaaaccccgtctctaataaaacacaaaaaattagctgggtgtggtggcacacgcctgtagttccagctactcggaaagctgaggcaggggacttgcctgaacctgggaggcagaggttgcggtgagccaagattgtaccactgcactccagcctgatgacagagtgagactccatctcaaaaaaaagaaacagtctcactatgttgcccatgctcgtcttgaactcctggactcaagcaatcctcccaccttgtccttccaaagcgctgggattacaggcatgagctgcctcacctagcccctttttgttttttaaagaatcatgctggttgggagcggtggttcatgcctgtaattccagcaatttgggaggctgaggtgggcagatcacctgactcaggagtttgagaccagcctggccaacatgatgaaaccctgcctctgctaaaaatacaaaaattagctgggtgtggtggtatgtggctgtaatcccagctgctcagaaggctgaggcacaagagaatcgcttgaacccgggaggttgcagtgagccgagatggcgccactgcactctagcctgggtgacagagtgaaactccatctcaaaaaaacaaaacaaaaacaaaacaaaaaaaaaaatcatgcttttggtatcaagtctaggaactctttgcctaaccctaagttataaagattttcttctatgttctgtttttaaagtttacagttttacattttacattaagatctatgatatatcctgagttaattttcttttttctttcttttttattttttttgagcagattgtcactctgttgcccaggttggaatgaagtggcgtgatcttggctcactgcaacctcggcctcccagattcaagtgattctcgtgcttcagcctcccaagtaactgggactatagacctctgccaccatgccaggataatttttgtgtttttattacagatggggttttaccatgtttgccaggctggtctcaaactcctgacctcaggtgatccacctgccttggcctcccaaagtactgggattacaggcatgagccactatgccaggtcctgagttaatttttatataaggggtgaggtttaggctgacattcgtacttttcactcttgatgtctcattgcccatttgttgaaaagactatcttttctatattgagttcttttgtaccttgatcaaaattcatttgggtatacttatgtggttctgtttctgggttctcttctgtttcattgacctatgtgtctgtgcttccactaatatcatactgtcttgattatcatggtcatataataatctcaaaaccagcaagtgtgactcctcctaccttcttccttttaaatattgtttcagctattctagttcctttgcctttctatatacattttaagataagcttgtctatacagaccaaaaaaaacttggaatttttatgggaactgcattgaattatagattactttgaagagaattgacatctttactatgttgagcattccaatccatgaacatggtatatctgtcccttaatttagataggttttgatgtctttcatccgggttttacagttttcagcatacaaatcctattcatgttttgttggatttatacctaagtatttttcagtaattgtaagtggaattgtatttttaattttagtttccaaatatttattgctggtataaataaatataattgattttctgtgttcatgttgtatcttgtggctttgatcaactcacttattagttctaggagttcttgtagtttcctggggctttatacataatcatgccatctacaaataaggagagttttatttcttcccttccaatctctgtgtattttattttatttttgccttattgcactgcctaggacttctgacactatgttaaataagagtgatgagacatcacacccattaggatggctacaacaaaaacagaaaataacaaatgctgacaaggacatggagaaattggaacccttgtacactgttggtgagatgtaaaatgatacagccattatggaaaacagtatggcagttccccaaaaaattaaaaataggattaccatatgatccagcaattccacttctgtgtatatacccaaaagaattgaaagcagggactcaaagaggtatttgtacacccatgttcatagcagcattatttgcaataactaaaaggtgaaaacattccaagtgtctattgactgataaatgaataagacaaatgtgatatatacatgcaacagaacattattcagccttaaaaaaagaaagaaagaattctgacccatgctacaatatgaatgaaccttaaggccgttatgctaagtgaaataagccagtcacaaaaggacaaatatatgattctgcctatatgaggcatatagagtagtcaaattcatagaaacagtaatatagcagttaccaggggcttggaggagaggggaatgggagttattgtttgataagtaaagacttccagttttgcaagatgaaaagagttctggagatagatggtactgatggtagcacaacaatgtaatgtatttaatgccactgaattgtatacttaaaaatggttatgataggccaggcacagtggctaatgcctgtaatcccagcactttgggaggccaaggtgggcaaatcatctgaggtcaggagttcaaaaccagcttgagcaatatgatgaaaccccgtctctactaaaaatacaaaaatttgccaggcatggtggcacgcacctgtaatcccagctactcaggaggctgagacaggagaatcgcttgaacccagaaggcagaggttgcagtgagctgagatcgcgccattgcactccagcctgggcaacaagagcaaaactctgtctcaaaaaaaaaatggttacgatagtaaattttatattatgtgtatttcatcccaatgaaaataatgaaataatgaggggtgagaatgagtatccttgccatgcttgtgatttttaggaggaaaagcaacaagtatttcaccattttgaggctagctgaaggtttttcataaattttgttatcaggctgagaaagtttccttcaatttctagttttctgaaagttttttatatcaggaatggatgttagattttgtcagatgctttttatgcatgatttttcttttttagcctgttaatatgatgaatcccattgagaaattgcaaaatatttggctaaccttgcattcctggaataaatcccacatagtcatgaagtataatttttctttaatgtgaaacatctttatttactttggaccaccactcttccagtgagattaacttttccacctttaactgcagtaaaagatatattaagttggtgcaaaagtaattgcagtttttgccattatttttaacgacaaaaaccacaattacttttgcatcaacctaatataacgtaaaatttgccattttaaccacgtttaagtgtacaatttagtggtattaattacattcacaatggtgtgcagccatcaccactatgtgttttcaaatttttttcaacaccccaaacagaaaacctgtatgcataaagcaaataacatcccttcctcactcagccctaagtaatttctaatttcctttctgcctctatgaatttccctattctcgatatttcccataagtagaatcataaaatatttgtcttttttgtgtctggcttacttcacttagccataatggtttcaaggataatcgatatagcagcatgtattagaatttcattcttttttatacatgaataatatttcattgcatgtacatatcatattttgtttattcactcatctgttcatgaacacatgggttgtttccatctttgtgaataacagtgttgtgaatataggtctataagtgtctgcatgagtccttgttcagttcttttttttgacatggagtctcactctgttgctgaggctggagtgcagtggcgcaatcttgattcactgcaacttctgcctcccaggttcaagccattctcctgcctcagcctgccgagtagctgggattacaggcatgcaccaccacgccctgctaatttttgtatttttagtagagatggggtttctccgtgttggccagcctggtctcgaacttctgacctcaaatgatctgcccaccttggcctcccgaagtccttgttcaattcatatggcaacatatttatttttacatattttttattgctgtataagatttgctttttttgtatgtacattcataaaaaatattggtctaaactgggcactgtggctcatgcctgtaatcctagcactttaggaggccaaggcgggaggatcgcttgagcccaggtgttcaagagtagcctgggcaacatggcgaaattttgtctctacaaaaaaatccagaaattagccaggcatggtggtgggcacctgtagtcccagctacccaggaggctgaggtgggaggatcacctgagcccaggaggttgaggctgcagcaagctgtgatcatgccactgcacccagcctgggtaaaagagtgaaaccttgtctcaaaaaaaaaaaaaaagataagaaaagaaaaggaaaatactggtctatagcttctctttttctttatttgttttcattctgcctttgtctggttttggaatcaggataatgctgactttataaaatgaaatgaaaagtattgcttcctcttctgttttctggaagcgatactaaagaattggtatcaattcttctttaaatgtttgctagatttctacagtgaaaacatctggacacaaagatttccttcttgggagccttttaattagagatcaagttttttaaatagttataagactactcataatatctatttcatcttaggtgagctttggccaagcgatcctcccgccttggcctcctaaagtgctaggattacagcactttgcggtctttgagcaatttgtccatattgtctaagttgagtttatatgcatagactcattcacagtattcccttattattcttttaacgtccatgaggtctgtagtgatagtggtcatttgtgtcttctctcttttctcttcttctgtcttgctaaaagtttatcaattttattcatcttttcaaagaaccagcttttgattttattgtctttattgcttttctgttttctatgtaattgatttctccacctctttatgatttctttccttctgcttgatttgagtttacttagctttttctagtttcttgagggaatgccttgtttagtaatttgagacttttccttcatttttttgtttttttgagacagagtctcgctctgtcatccaggctagagtgcagtggtgccatctcggctcactgcaacctctgccttccaggttcaagcgatttttgtgcctcagcctcccaagtagctggggttacaagtgtgcaccaccacacctggctaatttttgtatttttagtagagacaaggtttcaccatgttggccaggctggtcttgaacttccatcaaatgattcacccacctcagcctcccaaagtgctgggattacaggcttgagccaccacatctggccatttcttcatttttaatataagcattaagtgctataaacttctctctaagactgctttagttgtatcccacaagttttgggggaggtttcttcctgttttttttttttgagacagggtctcattgtgtcacccaggctggagtgcagtggtgctatcactgctcactgcagcctcaacctcctgggctcaagtgatcctccctcctcagcctcccaagtagctggaactacaggtgcacaccaccacacccagctaatttttaaattttttgtaggaccgtgtctccctatgttgcccaggctggtcttgaactcctgggctcaaatgatcctcctacttcagcctcccaaattgttgagattacaggcatgagccactatgtccaaccacgagtttttatatgttgtatttttgtcctcattcattttggctattttttttttttttttttttgagatgaagtctcactctatcgcccaggctggagtgcagtggcacaatcttgactcactgcaaccttcacttcccaggttcgagcaattctccctgcctctggctcccaagtagctgggattacagattcctgccaccacacctggctaattttttgtacttttagtagagacagggtttcgccatgttggccagggtggtctggaacccctgacctcaggtgatcagccctcctcagtctcccaaagtgctgcgattacaggcatgagccaccctgcccagcctaacttttgtatttttgatagaggtgaggtttcaccatgttagccaggctggtctcaaactcctgacctcaagtgagccacccacctcagcctcccaaatgctgagattaaagtgtgagccatcacgcctggcctccatccatttacttttaacctacctatgtcattatatttgaaatgagtttcctgtagacagcatacagttttttaaaatatattctgccaatctctgtatataaaccatttgcatttaatgtaattacagatatattagaacttaagtctcccatcttatttttcttctgttccttctgttttttattcttgtttccttttcattgccctcctgtggattactaagcttttttttagtgtttcatttagctttatctatagtttttttttttttagtatatctctttatatagttttttagtggttgctctggaattacagtatatatataacatcacaatgcaatagtattaatattttatctcttcaaatggaatgtaggaaacatcacaatttaggtccctttatcctccctgatttataaatatataggtatctttattttgtggtgggggaacaaagtctcgctccatcaccccatttggagtgcagtcacagctcaccgcagcctcatctccctgtctcaggtggtcctcccacctcagcctcccaagcagctgggaccatgggaccacaagcacctgccaccacgcctggctaatttttgtatttttggtagagatagggtttcgccatgttgcctaggctggtctcaaattcctgagcttaaacaatacacccaccttggctcccccaagtgctgaaatcataggcatgagccaccatgcccgtccccactttctttctgttcatccagaacatcagtgatgtgagtgttaaaacttaatgtactaaaggtccctggagctcttttcttttctctttttttagagacagggtctcacattgtcccccaggctggagtgcagtggtgcgatattggcttgctttaacctccacctccctggagttcttttcatttttaaaaatctactttctatcctttgttcatacttcaatctatttgctacttactctctgttgttcagaatgagtaatttctattgacctatcttcaagttttctgattctttcttctgccatctccattctgctatttggccctttcagtgagttttacttcagttcttgtatttttcagttcttatatttctctgttctaaaatttccactcaattctttataccttctatttctttgatgaaactttctattaaaaatttttgtgtcagccaggtgcagaggctcactcctgtaatcccagcactttgggaggctgaagtgagtggatcacgaggtcaggagatcgagaccatcttggctaacacggtgaaaccccgtctctactactaaaaatacaaaaaattagccaggcgtggtggcaggtgcctgtagtcccagctactcaggaggctgaggcaggagaatggcatgaacacgggaggtggagcttgcagccactgcactccagcctgggcgacagagcaagactctgtctcaaaaaaaaaaaaaaattgtgtcaaaagtattcatgattgtttgttgaagcatttttatgacaattactttaaaattattgtcagagagccaggcatggtggcttacacctgtaatcccagctactcggaaagccaaagagggacgattatttgaggccaggagtttgaggccagcctgagcaacaaagtgagatttcacccatatcttaaaaagcaaataaataaaaattttttaaatatttttgtccaataatttcaatatttgtatcattttagtgttggcatctattgattggcttttcccattccacttgagattttcctagttcttgagatgatgagtataacaagttattttctcttgtatcctggacttttgagacattacattatgaaatgctggtttcttttttaatcttgtcattgctgaggcaataatcagagctctgttcacacatttctggtgctagtcaccttacacagtgaacaaatcacaagttttgggtaatttgttacatagtaattgtaacgagacacacacacacacacacacacacacaaacaagcctatttgtacataaaagaagaaattgtctacgtgtgcaggtataattcttttgctccttgggccccaggacagcagtagagtaaaaatggctgtgtggggtccttggtggggtgggaattagaggtgatagggcccccaccatagtttaggtgacctgaaagctgggctgtatatctgttttagtgcatttgtgttgctataaaggaatacctgaggctgggcaatttataatgaaaagaggcttatttggctcacagttccgcaggttgtacaagacgcatggcactggcatctgttcctggtgagggcatcgggctgcttccactcaggatggaaggcaaaggggagctgcatgtgtggagaccatgtggcaagagaggaagcaagagagatgagaggtgccaggctctttttaacaagcagctcttgagaaacctaacagagtgaggactcacacattacctcaaggatggcaccaaaccattcacaatggatctgcccccaggacccaaacacctccgactaagctccacctcccaacattgccatactggggattaaactttttttttttttttttttgaaacagagtctcactctgtcacccaggctgagtgcatgatctcagctcactgcaacctccacttcccgggttcaagcgattctcgtgcctcagcctcccgagtagcgccaccacacctggctaattttttgtatttttagtagagacagggtttcaccctgttggccaggctggtcttggactcctgacctcagatgatctgcctgcctcggcctcccaaactgctgggattacaggtgtgagccaccacgcccagcccttatttttttttttttttaatttgtagagatgaggtcttgctatgttgcccaggctgggctcaaactcctgggctcaagcaatcctcccttctcagcctctcaaagtgctgggattataggcatgaataatcgtgccaggccaaagacaagttttaacagtcagctctctggccacaaattatttatattccttccacatgcaaaatagactcatgtctttcctcaacctcaaaaatctcatctactatggcaggctcagatgcaagccccaggatctcatcatctaaatcagatccaagtgttggggaggctacagtattgccagcatatagaccctcgagcacttctggagagagggatacaggtgcaactatttgggagagcaaaggatgaatatgtagagctgtgctgcccatcatgatagccactagccacatacagtaattaaatttaaataaaatgaaataaattgaaaattcagttcctgcattgcacttgccaaattttaaatacctaacagccacattggaccgtaaagatgcacaatatttctgtcattgcagaaagttctaatgaacagcactgattagaccatataagcacaggtatgccctgtgacccagcaatcttcagttcaggttctcccaaaagcatatcctgaagccaaagatgcaggtggcttatttgggagctgtttcccagaagcacaagcgagtggggaaactgagccaggaagagcaaaaagccaataaatggtgcagagtctggagtagagggaggcacctagagcacttccctgactcagagtgagcacctccttaatttttgtttgtttgtttgtttgttgagacagagtctcactctgtcacccaggctggagtgctgtggcacaatctcggctcactgcagcctccgcctcccaggctcaagcgattcctgtgactcagcctcctgagtagctgggtttacaggcacatgccaccacacccagctaatttttgtatttttagtagagacagggtttcaccatgttggccaggctggtctcgaactcctgggctcaggtgatctgcccacctcggcctcccaaaatgctgggattacaggtgtgagccaccacgcctggccccctgcttaaattttgactctggtcccctaatttgacccaccctaattccagcccccaaaaaggctactgctgtgagcagctagaagtcatttgttctggggacagtcagaagatcaaggagtcatgtagaagtcgcccgagaattgaccctccaagggaaagggaagctgcagtatttattccattgctttcagccctcactgtttgaggactgctactgggggaatcaatcctgctacttccagtccattctgcatgtgggcagtagaaaggccttggtctccagcagagaagcagaaagatccaagcacgtgaggcaggaaactgtcagcctgtgtgggaactgaccaccatatccacaagccgaggggatacagtagagggcatcagctggtgtgctaccgtatattccagaaagccgcccacccagaggacaggtgtgagccttatggtaatggggagctagaggcaacctaagtgtccatcactgggggaataggtaagtaaaagtgctgtggttgtatacaccatgaaatacagtgcacaggaaacttgatgtacacagcttgtgaagagatctcagaagcagtgttaagttaaaaaataaaaaagaaagaagtagaagatttatagcacaattccacttatgtaaattggaaacacatacacacacgagatcacaaattataaagatacatctttgcagctatttatcaagtgcattatagtgggtgtctgtgggggtgcgatgggaatgggaattggcaatggaggaataaaagccttggagggtctttcatgggccaattgtgatcctgtgttatgatctgaagagtatgattaataactttctgcaccaaagggctaagaaaaaaaataaaggagtgaaaataggaaatgtctgcacatcagagcagtttcttacctgctacacaattactattactgcagggatgatgatagcaaggcaaccagactcaccgcctgccttctctccaggcagcccctccagtccccaggaaatgcgcttgcccccagcgaataaggagttccctacccctctcatgctacccagagggacagaaaggagaagtgggcctgctacccccagaggttctcatcttctacctgggctgcatatggaatagggagcaagtacataggactcatcataccccatttctgcctctatcccactgtgggaccttaggcaagtcactttgccttcctatgcctcagttatctcactagtaaaatgggcatgattattgtattagtcagggttctccagagagacagaacaaataggatgtttggataaatagatgatagatagagagatatagactagatagatgagagagatagactagatagagagagagagagagagagagagagagagagactagatagatgagagagagataggaggggatttattaggggaattggctcagacaattagggaggctaagaagttccacaacaggccatctgcaagctggagaaccagggaagcttgtagtgcagctcagttccagaataaaagcctcaggacttagggggtagctagtgcaagtcccagcattttttttttttctgagatggagtctcactctgttgaccaggctggagtgcagtgacatgatctcagctcactgcagcctccgcctccagggttcaagcgatactcctgcctcagcctcccaagtagctgggactacaggcctgtgccaccacgcctggctgatttttatatttttagtagagatggggtttcaccatgttggccaggctggtctcgaactcctgacctcaagtgattcacctgcctcagcctcccaaactgctgggattacaggcgtgagccaccatgcccagctgcacatcccagcattcaaagaccaaagagcctggagttctgatgtttaagggcaggtgcagggtgtcccagctcataagagagagcaaattctcctttcctctgcctttttgttctattcaggccctcggccaattggatggtgcccaccacattgggtaacaacgggtcttccttactcagtccattgattcaaatgccaatctcttctggaaacaccccagagtcatacccagaattaacgcatcaccagctatctgataaacttaaccagtcaaggtgacacctaaaattaaccatcacaattataaaaataactactcagagaaacattaggagcatgaactgaaattagttaatgggacattcttaaaccaatggcagaagctccttcttggccaggagcagtggctcatgcctttaatactagcactttgcgaggctgaagcaggaggatggcttaaggccaggagttcaagactggcctgggcaacatagtgagacccctatctctacaaaaataaataaataaataataaagtaaggtggtggctcacgcctgtaatcccagcactttgggaggccaaggcaggcagatcatctgaagtcaggagttcgaagccagcgtgaccaacatagtaaaacccagtctctactaaaaatacaaaaactagccaggcgtgatggcatgcacctgtaatcccaactacttaggaggctgaggcaggagaatcgcttcaactcgggaggcagaagttgcagtgagccaagattgcaccattgcactccagcctgggcaacaagagcaaaactacgtctcaaaaaataataataacaataaaataaaaaacaagcttttttttttttgaaacaggatctcactccatcacccaggctggagtgcagtggcacgatcttggctcactgcaacctccgcctcccgggttcaagtgattctcatgcctcggcctcctgagtagctgagaccacaggcgcatgccaccacacctggctaatttagaataaaaaagaagcttcctctctgccactcaggtagccttatccctaatctcagcctccgtcagggactccctgaggccagttggctgaaagctgcccagggagttctaaggatttcagtttctctttccttcttgatgcagctcccagctcacttggccctgcccacacctgttccctcatcaggctcccagacgggccccgcccactcatgcctcttaagtcaaagtggaaattctcatttccaattaccttttcactttacacacatcatcttggattgcccattttgcgtggctaaaaagcagagccatgccgctggggaagcagttgcgatttagccatggctgcagcttggaccgtggtgctggtgactttggtgctaggcttggccgtggcaggccctgtccccacttccaagcccaccacaactgggaagggctgccacattggcaggttcaaatctctgtcaccacaggagctagcgagcttcaagaaggccagggacgccttggtgagttcctgttgctgtggatgaaccacttctacgggtgtcccaattactgcccttctactgtgggctagcctctagccttccaactatggcaaacctctatcctttctgcactgggttaaacccatgctgtcaggccaacttcatccttgctgctatgagctagcttccagccatcctgctgtgggctaacccctgcccttgctctctaggaagagtcactcaagctgaaaaactggagttgcagctctcctgtcttccccgggaattgggacctgaggcttctccaggtgagctgaaagtcaggcccccttcacccttcccttgaccctctcccccctcttcttaagtggccccttagccttctttgtttcccttgtccttcactctcttggacctctcctcacctgtcctgtgcccctgccacttcaaaactgctctcttgactctgtccttcccctgggtcccttttatcatctcccatcggccccacttccctagctcgctcacctgtccctgtcacttccactctcactcttcatttctctcccaaatgtctccagtctgtcgcccacctgtgcctttcgtcctgctccacttctccctgtctgttcccaacactgaccccctctccctctcacctgcctctgtcacctgtccctcattatctctcactgacattcatccagctcatgctcccccctcatccacccttctcttttttttttttttttttttttttttgagacagagtcttgctctatggcccaggctggagtgcagtggcatgatctcggttcactgcaacctctgcctcccgggttcaagcaattatcctgcctcagcctcccgagtagctgggattacaggcatgtgccatgatgcccagctaatttttgtatttttagcagagacggggtttcactatgttggccaggcttggtctcgaaatcctgacctcaggtgatccacccgcctcggcctcccaaagtgctgggattacaggcgtgagccaccacacccagccctacccttcttctctgtgcatgcaactgtccctctcttactgtgcccccaacctgctttctcctcacccgtccccaccccgccccagagaacttctgtgacccccgtaagtcccctttcatttgtctccatttcacttatcccctcacctgcctccttgaccatcctgcctcacctgtatccttcctcatgtcttccccctcctgtctccttctccccagacccctcacctgtccccaccacatgcactgtgtcaccgaccttccccaggactgcctacctgtccccactaactgggtcttcttgcctgttctccctcacctgctctttctcacctctcctcaggtgagggagcgccctgtggccttggaggctgagctggccctgacgctgaaggtcctggaggccgctgctggcccagccctggaggacgtcctagaccagccccttcacaccctgcaccacatcctctcccagctccaggcctgtgtgagtccttggggcccgggcacccaggtctgtgggctctgagcagcatccttcccctgtggtggcccaggctccgcctcacacaccgccctcttctgcccacagatccagcctcagcccacagcagggcccaggccccggggccgcctccaccactggctgcaccggctccaggaggcccccaaaaaggtgagtgacccaggaagagaaggaccagggtctggggagccaataggagcccagaccctggacagcccctgacccatcccctcctcccctacaggagtccgctggctgcctggaggcatctgtcaccttcaacctcttccgcctcctcacgcgagacctcaaatatgtggccgatgggaacctgtgtctgagaacgtcaacccaccctgagtccacctgacaccccacaccttatttatgcgctgagccctactccttccttaatttatttcctctcaccctttatttatgaagctgcagccctgactgagacatagggctgagtttattgttttacttttatacattatgcacaaataaacaacaaggaattggaaccttctgtgataggtgaatccttgagtgtgtgtgtgattgtgggtctgtgactgggtgtggatgtctgggtgatgcaggcaaaatttgtgactcgttgtgtatatttgtgtgtgcctgacttctgtgactatgtatgtatttgtatggaaatgagtgtctgcctgaacttgagtctaaccaaaggtgcgtaactgtgcatgttcatgcccacacgtgtgcaagtatgtgtgtgtactgccaggcatggtggctcacacctgtaatcccagtgctttgggaggctgaggcaggcagatcacttgaggtcaggaatttgagaccagcttagccaacatggtgaaaccctgtctctactaaaagtacaaaaattagccgggagttgtggcatgaccccgtaatcccagctactcgggaggctgaggcaagagaaatgcttgaacccgggaggtggaggttgtggtgagccgagatcacatcactgcactccagcctggccaccaagagagaaactccatcttaaaaaaaaaaaaaaaaaaaaaaaaaaaaaaaaaaaaaaggccagcctccgtgggctcaggcctgtaatcctagcactttgggaggccaaggcgggcagatcacttgaggtcgggagtttgagaccaacctgaccaacatggagaaaccccatctctactaaaaatacaaaaattagccgggtgtggtgatgcatacctgtaatcccagctactcgggaagctgaggcaggagaatcgcttgaacccgggaggtggaggttgtggtgagcggagatcacgccattgcactccagcctgggcaacaagagtgaaactccgtctcgagaaagaaaaaaaaaaaaagaaagaaaagaaaagaaaagcggtcaggatgctacatcctggaacctaaccacaatggtgtgagaagcccagacatacagagagaccacatataggtactccatctgatagtcccagtatagcttttgaatcaccccagctcaggaaccagacatgcgagtgaagaagcatttagatgactctaggtcccagctggagcagagacaagccatcaccactgggccctgattaagttcctgacccacagaaactgtgagcataataatatttgttttacgccactaagttgggtttgttataaggcaagaaatcattgaaacagtgagagagccaccagcccatcacaattcactgtgaggtgtgtcacaagaaatttattaccaaaataactcatcagagtttcttttttgggttggggagagggggacagcgcctggctccatcgcccaggctgaagtgcagtagtacgatctatctcagatcactgcaatctccacctcctagtttcaaaccgtcctcccacctcagctttccgagcagctgggactacaggcatgtgcctccacccccacttaatttttgtaatttttgcagaaacggggtttcgctatgttgcccagactggtgtcgaactcctggactcaagaaatcctcctgcctcggcctaccaaagtgctaggactacaggcgtcagccaccacaccagctccaccaaggtttctgaatggttgactttttgttacattacaggggattcagaataaaattccattcttataatcctataactctcacttctttgtatcgtttgtttgtttgagacggagtcttgctctgtcacccaggctggagtgcaatgacaagatctcagctcacagcaaccttcacctcctgggttcaagcgattctcctgcctcagcctcctgagtagctgggactacaggcacatgccaccactcccagctaatttttgtatttttagtagaagcagggtttcaccatgttggccaggctggtctcgaactcctggcctcaagtgatcctcccacctcggcctcccaaagtgctggaattataggcatgagccacggctcccagcctcctttgcactcttgagtattttcttgattaggagtcagagggctgaagtacagccatacacagaaattacacacaaccaacgggcaaaagttgaagcactccctttgataaccaaaaacaagttaaatgttcccaggtgtggtggctcacgcctataatccctgcactttaggaggcctaggtgggaggactgtttgaccgcagaagttagagaccagcctgagcaacatagcgaccacatcttcacaaaaaaacttaaaaattaggtaggcatggtggcacatgcctgtagtcccagtcccaggaggatggctcgagtccaggaggttgaggctgtagtgagccatgatcgtgccactgcactccagcctgggtgacaaagtaagactgtctcaaaaaaagaaagagagagagagagagaaagaaaggggagttaaacgtaaaaaagctatttgtaaatgtcttaaaaatttacacataacctcacagccattcccactacattataaagtctgtgactagcagaacctcagtttgggtagggggcagcatggtgccctgcccaggacatgaatttctgtcccttttgcctgatacctgctttcccaggctccctcgcagctcagggtggccatgaaattaagggcttcttaaataatttatgctgggtacagtggctcactcctgtaatcctagcactttgggaggctgaggcaggcagatcacttgaggtcaggagtttgagaacagcctgcccaacacggcgaaactccatctctactaaaaatacgaaaattagccgggtgtggtggtgcgtgcctgtaaccccagctactcgggaggctgaggggcaggagaatcgcttgaactcaggaggcagaggttgcagtgagccgagatggtgccactgcactccagcctgggtgacaaagcaagactccgtctcaaaaaaaaaaaaaaaaagttaatttatgtaaaaaatgtaacagagcttggcaaaggcggagccccatacatgtgtttgttgctgttactcttattattttaacatatttttcttccttaatacaaacagaactctttcccacttgttcccttccttcctgcttagttcattggtatgaggatgtgagacccagagctatggcaaccattttgtgaccacaaggcaacaagtttagggtgtgaagctatcattttgaggaaggtagaacaaaagagtagaaaacggggtccttgctgatattaataagccattgcaccaaaccccagaatcccctaactccagacttactcttaggtgacataactgaatgtctttcttgcttaagtcgtgttaattggatttttctgtttcttgtggccaaatgtatccccacaaattcatctctgcatggccagcactgaacccagagaatgtggtcaattaatatttcataaaaattttaatcatataggacatgtctgagcccaggcatatgagtctcttcaattatgaatgttgcaatggaagaaaacaaggttgcaaatctctacttggagatgccaaggctttatagaagagattttgaactggatatattttagttttgcctgagcagcatccattactcctggtaacagtgcttcaattttccttcggaaatgacctcctttcctactccctcatttggctggacacatgactccaatttgatcaattagagcaagcactccatctccagagcacagtaacaagttttccttgtcctctctcatggtggcctttgcttaagtggttccctctgcttaggacagttcccaccactctcccacgaccaagtcttcacctggctcatttccacaatatcacttcctcctccaaaaatccttctgcatagtacaccggggtttctattgctttattttttattttatatatatatgtgtgtatatatatatatatatgtgtatatatatatatatatgtgtgtatatatatatatatttgtgtatatatatatatatatatattttttttttttttttttttttttgagacagagtctagttctgtcacccaggctggagtgcagtggtgcgatcttggctcactgcaacctccacctcccaggttcaagtgattctcgtgcctcatcctcctgagtagctgggattacaggcacccgccaccatgcatggctaatttttgtacttttagtagagacaggattttaccatgttggccaggctggtctcgaactcctgacctcaggtgatccacccgcctcagcctcccaaagtgctgggattacaggcatgagccactgtgtccagcctctattgcttttatatgctcaacaagctttcttatttttttttcttttttgagactagcatattacagcaacaagctttctttgttttatttttttttaagatcttgctctgtcatccaggctggagtgcagtggctcaatcatagctcactgctgcctcaaactcctgggctcaagaccacctcctgagtaactgggactacacgtacacaccaccatgcttggctaattttttatttttatttttgtagagacagagtctcgccatgttgcccaggctggtctcaagctcctagcctcaagtgatcatcccaccttggcctcccaaagttctggaattacaggtatgagccaccacacccagccaacaagatttcttatcctactttttctggagagtatttaccttcaaccacataaaattgccaatactatacaatgtgtgacctacaaaaatggcaagttcatgtggttcaacctaatatttagcaatccctacttcccaggacacacaaccgggacataggacccacccaccccctacctggccaatcaaagcattccattcattcccttggatgcggcaatcagtgcaggggttgctatgtgacctcggccaggccgataagagctcttccctgagatttttctcttaggactagagattctgccattttatctctgggctctggaaagattgagtctgtgtctgtaaataaatgaccattttcccccgccacatgcagttgaaagggatgagtctgagctgagccaagcagagaagagagctgtgtagggagagtgtcttggtggggttgagtctgggttcctttctctaaagctctgttccttgtagctttgcaatcaccccacaactttttctttttttttttatttttgagacggagtctcactctgtcacccaggctggaatgcagtgatgtaatctcaagtgattctcctgcctcagcctttcaagtagctgaaatcacaggcacccaccatgcccagctgatttttgtatttttagtagagatagggtttcaccatgttggcgagcctggtctcgaactcctgacctcaggcgatcctcccaccttggcctcccaaagtgctgggattacgtgtcagtcactgcacccacccccaattctgttttgaaggtaggcatacctcaccccaaagctggggtctccatagaaatcagaccacataccacccctggtaaagacccttcattggcttcccatggccccaaagaataaaatgttaactcttgaccacacctcacaaggttctgtagaacccacttgcttctcccacctactctcctctcactcttcccacttcagtccagacacactgcctccaacacatcaagcacactacttcctaagggtctttgcacatgctgttccctttgccaggaatgcttttccctgcttttctcacaatgcatttatttagctctgtcatcaccatccttcaccctcccacctaaagtaggcctcaaagtcattctctatgccatcatcctgttttcattcttggcacaacatttatttgccactggacatgcattatttactcgtttttgtttgcttgttttttgggtctcactctgccacacaggctggagtgcagtggtgcaatcagggctcattgcagcctcaacctcctggactcatttaattgcttatttgtttatttctcctccctctagaatataggcaccacggagcagggctttcttgttttgtttcatctattttgttcactgcgatagcccctacataggaccagttacataatacatgctcaataatgctttatcaagtgaattagagacaagattcctgatggttctgtgtgcaggttggaggcagtcagctttccaatcatggctctgctgttaactggctgtgtgatcttggagatgctccttaacctctctgagcttcagtttcctcatcttgaaaattgtgtgcacacactgcatatacctgtgcaggctttaaatgcagtcatacttattattggagtaactccatttcctaagcattatgtgccatgcactgggttgcatgctctttatccgtgcatcagggagggtttgggagcactgtgcctggcttgtgaaaagccctcagtacctaggagtcgtcatgactgacacaaatgagggtggttgggctcctgggtgaggaagcctcctggcctgtgattctctggtgcctctgtcctagcagcctcccaccctgtctgcctagatccatccccctccctcctgctccgtttctatttctgtctttctctcctcctcccctggcctcagggggcccctggctggcaagaagccttcctccttcttccccaagatcaggaaggtgttatcactgcagggcccctgcaaggactgggatgtctgtccctctcctctccccaaccagctttccttccccagccacagccctcagcctcacctgagaaactcctctccccacaccatcctccatgccctccgccagggtccctcagattccaggcagagcgacacaagaggtcttgtccctgagctcaccaggctagctgtggatatccaagctcagctaagctcatgggggccataccccagcttccggacacagaccccagaggcagcatagtgtaggggtacaatcaaacttccagctccgctatttattcattggggggatggagggactacggcaagtgacttcatctctctgtggttcaggttcttgtctgtaaaatgggaccaaggatagatctaccctaccccactgagttgtgaggtctcagagggtggaatgaatattcaataactgctcagcagtacagtgctctagttgagtattaaaggagttcagggaatgtcaccccaaaatatggcaccctggtatgctgattattttaaattaaaggcacttagagatccatagatgctggaagaggctttcctcctatgtcttcttatctgcctaaagatcaaaaagaacacaagtgccttctgtcctctccctgacatttcattatctttaacaggaaaaaaagacagagaaatgtctacacctggacggactttgtcacaagaaattatctgtctgtcagtctcaaattccagagacatttacaagctaaattctatctcctggacccatttattttccccaaaatcatttattacccctcaaaattgccttcctttccccatctcccctcctgtgaagaaaggtatataagtatataaacctcactgggttattgggtaatcactttcctgtgattttcctagtgcatgttaaataccctccatattccttttctcttgttaatctattgtcagcccattccagtgaaatttcagagagtgaaggggaagctgtcttttcacccctatagtagagactcagaagttggcctgcctgcctttttaaatcccagttttaccaccttgggccagttatttaacttttctgggccaaaattccctcatctggaaaacaggataataataccgatatgtcctggtgttgtgagaattaaatgacttaagtgcttggcacatagtaagtaagtattcactaagcgttagctattatgatcattttatttttgtgattattccccacctctaagtctctcagaggataaaagcctgtctgccagtctcctccggccccagttagtcatcttcccatcttccttcagtctcacttagagtccttatgctgcaatctaggtcaccctcccccaacacacacacacacacacacacacacacacacacacacacactacacgcggacacacatacagacacacacacaggtcagcagggcctcagacacagaaaaaagtttaattctgctgcggcggagggtcccggctccggtagggagggggatttggttttggattttgttcgtgtggggatttatttgggagagtctggtccttccagtgggacctgcccgggagaatgagtaaagagaagaaatcaggagagacagggagactagacaaaaccagggagggccgagggacaagagacgacaggacagagagaaaggagaggcaaatagggaaagacaggcactacagagagacgacaagagggcgggatagagacaaacgagggaaacagagaaagggggaccccaagccagacccgaccggaccaggaatgtgcgtggggtggggtgggaggctttggaggccgccgcgggacagaataggatctagtccagccagatacaagaaatgggcccctcgccccggccccgggtgacgggctgggggagggggctcgtgtctcagtgctgcagtgtcagggggccctgcccctccccgcgcttcgctgtgtaaggcaccggctccagcgaggtccgcgagcgcgcgaggggaggggtaggaggggggtcgaggagtccataggggaagggaggccggcagccggtccccgaaccccgccctgggcacgggggcgtggcctcgagccgcagcccgaggctgccccgccccctcccggggacaagggcgcgtctccactctggtccaatgtcttggcgctgcgctttctcccagtcccgccccagcgtccgtgcggctgggcgtttggtctgcggcacccaggcgtcccggcgcccgcccgccgctcacacggtactctccagcatccactcggtgctggtgaaagccaggcacgccctggcggagcccagccccaggtctccatcctccccggccgcgccccctccagccccgtccaggtgcggcgtggaccggtggcgctttgtccgccgggcgcggcgcgggtaactgtggctctggaatagtgccccgtagtccccgtcgaacgaatagcgctgctgcggcctcggccgggccgcggctcccccaggaactagagctagagtagggggcgccgaggttggtggctccagggcgccggatcggctccttcgagggcccaccgcggcccgagactcctccccggaagtttcctcggatggcagcaggcacagcgaggtggccgagccgcccagagaacgtccaaggaccacctccggctccgcggatgccgtctcggcctccatggccttggcctcgacggcgacggcgggggcagcctgggactccacctcgcgcagcgcctcgtagtggtcctgggccggcagggccggggcctgtgccgcgcctgtgcctgcgccgttggtctgcgagcacacgtggctgacccgcgggagcgacctggagcccttgacgcggcggctgtccccgtcgccatacaccttatagcggatcatgagcagaacgatgaagacgaggaccgaggcgacgatgacgcccccgatggcgatgatcatggtgccgcccaagaaatgggccctcagcgggcggcagggcgccggatccccagcggtggtgaactgtacacagcccaccactcgcgttgccggcagcgctgtggccccgtcgtcgtagaccgccagcacgcacaagtcgtaggcacggcccgccgccaggtcattcaccaggaaggtctgactggtggacgggatcatcctgtaggagggggcgggttcagggcggggttagtccccccgaaccacgccccttcgctttatgccccgcccatggtgaacagtggggactaaaccctgctatcgaagtctcagccgctactgagacaacagcagcaattcaagccccgcctccatcaacatattcccaccctttcacacccctcatctgtatgccccgccctcagacccacctcctggctgtgtcccatcacccactgggacaatatatctatcattcgtattacctcctctgcatatcccggcccctgcaggggagaagtgctatggcttttaagccctgccctcaagggacatgctccctagctatgtctcactcttgctaggacaactgccattcaaggtccttcatctaggcatttctaccccaaaactgggccaacgctactggccacctccccttttctgcatgccccatcccccactcaggtggacactaaggtcagctcacagcgcctgtcatattcctactggaacaatggatgctcttctagttcctcttttatacatattcctgcctttcagggaaaaccatgatgcaggtcgctcccccttatctgcatgcagcacctttgggtaaaacatctagctttggccggctgcagtggctcacgcctgtaatcccaacactttggaaggctaagaagggtggatcacctgaggttaggagttcaagactggcctggccaacatggtaaccctgtctctattaaaaatacaaaaattagccaggcgtggtggcaggcacctgtaatcctagctactcgggaggctgaggcaggaaaatcgcttgaacccgggaggtggaggttgcagtgagccgagaccacatcattgcactctagcttgggctacaagaccgcaagaccgagactctgtctcaaaaaacaaacaaaccaaaaaaaaaaaaaaaaaaaaaaaaaaaaaccatctagctttgtctatgtcctggaacagtttccaagtcccttaactacatgttccctgacattgctacaggccattccccaaccaaatgaaatgtggcttccaggcacaccccacaatggcccactaaggatggttcccctactgtgtataggccacatccagactacaggccctgctccttgtccagatattaaaggcaaccacctcatatgttcatgtgccaccagaagtcaccaaatcacgctaccaggtaagtttcttccgtaaaggggtcaaacgtagccaagcacacaccatattcctttcttgctgtaggcccctcccctcgaatgaagactagtgtagagaagtggttaagatgacaaaggctgggggccagattgcccgggtttgagtctctcctctgccacttgcttgctctgtgacctcaggcaagtttctcttttgtttcattttgttttgtttgagacagactctcgctgtgtcacccaggctggagtacaatgacgcgatctcggctcactgcaatctctgccttccgggttcaagtgattctcctgcctcagcctcccggacagctgagattacaggcacccaccaccacacctggctaatttttgtatttttagtagagatggggtttcgccacgttggccaagctggtctcaaacttctgacctcaggtgatccatccgcctcgatctcccaaagtgctgggattacagtcatgaaccaccacgcccggcgaacttcgccaagtttcttaacctccctgtgtctcattttccccaaatggggatgataataattcctacatcatagagatggtgtgaggaatgaatgagttaacacagccaggacctggcacttaatgatatcatcattagcttgcatcacacctcgtgttggccagtaacccttgctgtggctcacactatccagcccattgcattcctcccatctataagatctacccctctggagggccattcctgctaggccttggccctcttctgttgagcacatcgtttccacactgtgggccatgtccagcctcagctaaacctggactgcccgttccacattgattggcatggccaggatgcaacctcacaagctctcttctccagcaaagactcttggtgggtcccgggagacaaggactgccccttcctcttcgtgggaccatgcagaacaagctccaccccctctgacaggccacatccccacctccgaaggcctgcttatctctccgatgcttccgcttcccctccagcagagccaccttctggccctgaagctccacctctgtcatcccacctccaggaggttctcccactaccaagagccaccctcccaccaaaagacttccaatcagggccccgccccttcataaaggtccacccacttctccaactccactctacccacccctgactgccatttcaaagaccactgccacccaccccagccaccctcggctgccctggctttaagccttcctcctcctctcttcatctctcctctccagagccctggattccacttgctccttcccctaaatagccagttgctaggggcttcccccaccccttttcaaggacagaggctggctccttaagaaagcttcagcccaagtgtctctaattggctgcagaattaaagcaagcagctaagcaggcttctggttggctgccacctccgcccatgacagcgtgaggaagttaacccctgcggcaccatagcataggaatctgcaatgggggttggagaactggaactggggccctacagggaagagaagagtcccagggtctgttgcccagctggggacagggggccatcaacatctgcatccatgcagggtctgggggcttgtgaacctcccccaccccaccatgtggtggccatggctcagagcaaaggaaagagagggacagagaagtggagagtcacagaagctcagaattatttacagaaatatattatccatctcccttccaagcagtgggtgcccaacaaatgtgtgtcagtgtataaaggacagctttgctactttctgtgtgaccttgggcaagtgacatcccccactgaacctcagtttttctgtctttgaaatggagagggggtcatcacgccttcatagcggagctgggaagatcaagcttggaagttcgttgtgaaggtttgtgttttgttcatttgtttgtcctcatgtttgtaaggctgggccaggatctaacctatctcagtaggcccagggcccaacacaagatgggcacacagtaggcatctactcagtgtttgggaccagaatcaaaaagagagggaaatgaggaagacagagacaaaagaaaagggaggctttttttttttttttttttttttccagagggagtctcgctctgtcacccaatggcgcaatctccgctcactgcaacctccgcctcccaggttcaagcgattctcctgcctcagcctcctgagtagctgggattacaggcacgtgccaccacatctgcctaatttttgtattttccgtagagacagggtttcaccatgttggccaggctggtcttgaactcctgacctcaagtgatccgcccgcctcagcctcccaaaatgctgggattataggcatgagccatcgcgcccggccaagaggcatttttttcattcaaccaacactgggaaagcacctactatgtgccacacctatggccaagaaaacactggaaaggcagagatggaggccaagaggcaggtttctcggtgaagatctgacagccaggagctggggctctccacaggtagggaaacagctccagccccgctggcatctccaggtgaagccaagcagatgactgaagcatttaactggtgctctacaatgtgcatgagggaggcagagctagaaggagagacatccatgtggcaaactaccatttatcaagtgcctactgtgtgacaattctgtggcagagagccatactaaaaaactaccaagatgggccaggtgcagcggctcacacctgtaatcccagcactttgggaggccaaggcaggaggatcacttcagcccaggagttcaagacctgtctgggcaatatagcaagacctcatctctactaaaaatttttttaaattagcccagtgtggtggtgcacacctatagtcccagctactctcaggaggtaggaggattgcttggagcccaaaagtttgaggctgcagtgagctatgatcataccactgcactccagcctggggtgacagagcaagaccctgccaaaaaaaaaaaagaaaaagaaaaaaaaaaactactgagatggagagacatggcaaggccaggactgcaactcatagtgtactatggaccacgacctactgggctataagctccctgaggacagggtctgggtggtttccctgtgtccccagcacccagctcaggagtttgcacaaagcaggggctctgtgcctaacgagggcagagaaggtagagacagacagagaggtgaaaggagaaataaggaggcgatgggagaaaataactctttttttaaaatgtctgttgacaccgtatggtctgtccccaccagggcaatggcttcaaacccaagtgagggtggaaataacatatttttctcatacgttttgttttctgtttctgtaatgtacccaatgtgttggttcagtagtactggtatataatttataaatataaatgtcgctgtaggctaggcacggtggctcacacctgtaatcccagcaatttaggaggccaaggcaggcggatcacttgaggtcaggagttcaagaccagcctgcccaacatggtaaaatcctgtctctactaaaaatacaaaacttagctgggtgtgttggtgggtatctgtaatcccagctacttgggaggctgagggacgagattcgcttgaacccgggaggcggagggtttcagtgagctgagttcgtgccactgcactccagcctgggcaatagagtaaggctcagtctcaaaacaaacaaataaataaatgtcactgtaaatgtgtgtgtgtgtttcatgctccaaaatgtttaactgaagaggtgcacaatcagattgttgtggggagcagtgatatcgaccatgagccccatgagggcagggttcatgctgagctcagtcactgttaggactccagtgcccagccctggtcgggttcatgtaggtgctcagcgaatattttctataagcacgaaaaacagagacagtgagaaatagagagaggagacagggcaaaggagggcgggaacagctctcacagccatctagaaccctggctgagcaagaaggccaagggaatgggcaggtgggagggagggtccccctgggcttgggaggaggccctgggactgcagcacccgcacccacctgtagacgagggagtcatcaacggaactgttgtactgaacctggtacatgcgtattccgggcacaggcctctgggctggccagcggatgagcacggagttcgaggtgagctcggctgccacgagccgacgctcagccgcagaatcgttggcacctggtctgcccggcgtggcgatgtcagaggagccgggctcggtgagaggcggcggggcagccggcgggggtgccatcagaggcagaggtaccacgcacacctccacgggcgccgtcgcttccccagcagcattggaggcgatacaagtgaaggtgccactgtccctcaaggtggtgatggtcacatccagcgtcccgtccccccggacccgggtccggctggagttccccagcagccgcccatcaggtgccacccagtgcaccaccggctcggggtcacccaccgctcggcagcgcaggctcaccgcctggccttccaccaccagggcccggccccccgcctgccgtgtgatcagcgggggctcacacaggaactcctcctcggggatggaccagaagtagcggtcggtgaggtgttcgggcgtggcgcaggtctctaagtcgtcctcgcgggtcagccgccgcagccagagcagctcgcagttgcagtgcagggggttgccgccgaagctgacggtcagcggggtgggcggcttgggcccggtgccctgcgacctcaggaagagcccgtcgggcgggagtttatgcaggcggttggaggtcatgtccagacggaccagcttgtgaagctgcacgaaggtcccctccgcgatgtggtcgatgaggttgtggtccagcgtgagggtgtttaggttcaccatctggcccaccgcctcccacggcagggcctccaggttgttgtaggacagatccaggtcctccacggtggacaggaaggcgtcaaaggccgccgactccacccggcggatctggttgtttccaaggatcaggtggcggaggttgcccaggccgcggagctggtcgccgcgcacctccgccaggcggttgctgtccaggtgcagggcccggagggcacgcaggtcggcgaaggcgccagctgccacctggccgatggtgttccgggagagagtgaggtgcaccaggctggtcatgttggcgaagtctcggcggcgcacggcggcgatgaagttgtcggtgagccgcagctccaccacgcgccggtcgatggcgggcggcacaaagagcaagccggtcttggcgcacagcattgtcagtgtgggcgccacgttctggcagatgcagcggccggggcagggctggccacgagatgcccccgcccagagcagcagcagaaagggcagggcagcgggcggcggcgagaggagggccgaggagaagggtcctggagccatggtgcagtgggaaggcaggaggggtgggaggtgagacctgccggggaaggagccggttacccaggcgtgggacttggccgccatgggatgtcctgctacgagtcaggcctggatccctcccctaccgcctacagctgggttccataggatggtgagaggaagccactatcagctattaacaacagattacaacacttccatgctgggcacagtggctcacgcctgtaatcccagcactttgggaggccgaggcaggcggatcacctgaggtcaggagttcaagaccagcctggccaacatggtgaaaccccgtctctactaaaaatacaaaaattagctgggcatggtggtgggcgcctgtaatcccagctacttgggaggctgaagcacgagaatcgcttgaaccagggaggtggaggttgcagtgagccgagatcacaccattgcaatccagtctgggcgacagagcaagactccatcttaaaacataaataaaaataaaaatatctctatactggttgatagaatacccctgtccctacttgcgtgtcccaccctcacctctgcccctcctgtagtagctcccaaacctctcatgatctcccaaccagaggggtgacacctggcccaacctgggccctccagtacccactaaattgtctaaaaaatcactgttaactatggtttaaggccctggctatccaagccatactccctagctccaaatcccagctctgatacttactagctgtgtgacctccagcaagtatctgaacctctctgattctcggtttcttcatctgtaaaagggagatagaaacaggccttacttctgtgaggattaaatgtattgatgaacatagcatacttagaatagtgccaggcatataaaatgtgcttattacatgttagcaatcatcatcatgatcatcaagtgcttaatatgtaccaggcatagaacagtgccctattattgagagtaagtactttgaaatcaaacagactcaggttcaaatcctgattccccttttgctagctctgtgacccccaagccaatgatttcccctagctaggctgtaatttcttaatctgtaaattgggatgataattgtaccatcttcattcatgtaccaccgaccatgcctggcatacagtaagtactcaataaatgttaagggtttcccccctcccgcctctggcattggcagggagagtgtcaaagtgggagggactgaggaaaacacatcagagtcttccagttcagcctcaggaaggccttctctgaggtctggtttcatcctgggctcagttgagctcccaagcaaggcagactttcatgctcacatctttgggtacacacaacacacacacacacactcacacactcacacactcacgctatgtctctgctccaggcaaaaccttccggcagggattccccctgcggcggctgcagcccacgacatgtcagttcccatcacaacacagggtgggcggggggtgaagaggaaaggatgggaagggggcgtccctaaaactgttttcaccccaccctgccctgtaccctagcccctgctggcctacctcccaggaatctgtgtttggggctacggccttaggtggctttgatcttcctgccagtggggagggggcctgggacagagaccaggaaagtcagagacagaggtgaagagagacaaggagagaccagggggagggagaagtggactggcaaagagagagagacagattgggagagaaacagagagacaaaaagatgagtctgaaaggaaggtgaacagacagaaaactgagagtgaagaatgagacacagaaaagagagagacacagaaaaaagacacagagatggagagaaaaatagagacagtattagagagaaaaagacagaggaggaaagagacagagagtaagagagacaatgaccgggctgaaggcggaaaaagaggccggatcggggtgtcctaccatctctgagttcaccccaaatctgtccttcactccctctagatcactactctacaatgtactggaaaccctggcctagaaagggggactccagaattaggagcctgagtctgcccctgcttggctgtggggtcttcagggctcagaatcccagtctatgaaacagaagtccagagcctcgcctccgacagctggggtaggactcaaatggagggaataataatagcaatggaaatagctaacatttatggagagtggtgcagcactgcaggacagaatccgccctactgcctgggttcagacctcacctccccactgtgtgactttaatcaagtgacttcccctttctgtgcctcggtgtgctcatctgtcaaatgggaataataatggcacccacctcataaggttgctatgaggatttaatgagataatattttatgacatgcttagaatagttcctgacaaagtaaacactatatacatgtgagctgctgctattatcattattattattactattattattactaatttattattttctccagctttctcagccaccaggaggtcaggctatcgggagatcttcccacacccatgcacacgcacatacaaaatgggcaaacatattcactcaaccctctaaatgcaggggtcatttcatatcttgacatattcttgtatcctttactgatatcatgaggaaaccttgctttcccaaacaccttaaccatcctgagaatgaatgtctcttggcctgaaaccccccacctgctccccagagccacctggccaccacaagccctcacccaactttgatgttcctgaccttgtcaccactccccagccttggacagagtggtgggcaactggtccttcaggaaactgtcatcccctgaactgaaatccatgcgaggcagggttccagacccccagctggctgacagcaagccccatcaccccccatgtctctctctctctgaagccttacggctctactcacctctcttcagggagtcagggcctgggccagcacctgcaaaggaacagaaccaccttgttagcatcgttctggctcttctctgtgcaccagatcttgccttggagaccatcccggccaaggaagtccctggtgtgatcacgctctcagtcctcctgtggcgggttttgcatagtctcacaggaacccagaagtcctctctggaatcctagattaggcctcagggttgttcaccctccaaagcccaggagtcgaggactttagccctttgtcctctggggtttcaggagccaagaaccccagccccctcttccctctgacccaagagtccagaccagacctctggccctccattagaacccaagagtttacatcccagcccctcaactccaaagtcctgaacggtaccaagagctggggaagggccaaagtttcccatccttgccatgatactattgcccacaccaacatgtgtgtccatgtcagaacccacgcaagcccacaacccaagtctctacatctggatttctatgaacatagcaacatgatctgtgtgccctccgccctctatgggcacttggcctggcatatggacacactgtgtccagggaccccaggcgggaccccagtataccagaggtcatgccacatgggcctcaaacccactgaacccaagagtagggacagccttgtgccagggcacagacacatgtgtctttcacatacatgtctgaacatacacaacccccagagaccaacaccaaaacacaaacagactcacaacatagatggatacataccctcaaggttgacacacctgcatgcaacaatacatgtacaacactgactctgccatgcaagttcacacacacaaatgcacagatacaacagagaaactcatgtgccccctaacagacaaccaggtacatgcatttacaacagatctaccttgcacactcaccagcacacaggggcacacacatctaacaaacacacacacacctgtgcaaacatacacaagtgcacactcttaaatgcctagacacactcatacttcacacatctccatgttgcaaagttgatacagcaccacgctaacagatacatacctcacacacacacacacacacacaaaaccacaagcatacagatacgaggctgatccacactggaacacgcacacaggcacaaaaagatccacctttgcagacacgccaagatgttcactcataacagacacatgctcacacaacagtcctgtgatttacacacttccaaatgcatagaaaatactgaaccacagtagcacagtcagtagacaggcccagattcacactcacacagtcttggacacacattcctcccagccctgaggcacccccccaccaccccacctacttacttcccaggcccaagaaatcctaacatccctgcagcacattcagcatcctgccctccacacccccaaaaaaccagggcaaaagccaggccagaggtcagagttcagcaggtggaaactcaagaggatttgggggtttgagtcctagatcaccgtttcaaggagatcctcccaccagcagccccaaaggttccccagcctggccatcaggatggaggtaactctggctccgtctgcagatgtctggccggtgggggaattagggtggagtgggtggggaagggccgggtcttcgccccccaacccccacctcagggcccatctgtccatttctcggcctctcatcccccctccatctgtccacctcctggccgcccatcccccccccgcaaccaccgggaaggggaagacatggccgcttcccccaggaccgctaaggaccccccagttgacatggaccgagggagcggcgaactcccctcccccaaatccacaccgaggcctgggcgccgagcctcagcccccaagccagcaacctgccgtggactcacagatacacaccctcggagacatacaacccgcagacacacacacacacacacacacacacacacacacacaaatggacacccgagcgggcacacccggctccacagacccggggatggacatccaacccggacacaaacacccagagcagctagtcgcgcacgcacatgggcttgggggggacccacacctgggcacacaacccacgcacacacacacctgcacacagcccctccgatgggcgcgcgacagcgcccagacacacagccggaggggcggccgctcggggggacacgcgtgcacagccggacacgccggccgggctcgacaccccgcgcacacccgatggccacacgggcagggcgccgcacacgccggcaccgggcacacatagggccgcgcgggcgcacgccgggcccgccgcagcgccacggacacacactcgcacgctcgcacgctcacacccgcgcacacacccgcgcccccgcccgccgctcccgggccgctgcaggccgcgctcacccagcccgggggggccccgggcccggccccgccgccgctgcctcgctccgcgccatggtggggggagggccgggggagggggcgcggtgccgcggggccgcctccctcccgcctcccgccctccctcccgagccgcagccgagctccgccctccgcgccgcccgccgccaccgccgccgcaaggggggagggggcgccgactggtgggggcggccgggcggggcggtcgcacacccgggatccccgccccgaacccgccgcagacccctctccactgccgagccgccgcgggcccgcccccgacccttccccagccccacccccagccccgccggcctccccggagacccccccagaccacgccccaactggcctagggaccccggatctccctacagagacctcccatcacgtcctaatacccagggggacctcggatcaggcctcacctcttttgagaacccaggcgatgttctagggccacccaggaccacaaatcatgccctgctctcctgcttgacctcagactatgacccacacactgtcaggaaccccagaccatgcccccaaacccagaagaatcccagatcatatcccagcatccaaggggatccagaccaccccaccagcaaccctaaatcatatcccaacattcagatagacccccagaccacaccccttccctcacggaccccaaatcataccctaacatcgggggagacttcagaccatatgtcagccaaatcccagatggtgcctgactccctttggggacccaaaccacattctacagccaccagaaccacaaatcatattccactccttcttggggacccccagccatgtccttctaccctcaaggaccctaacccattcccttacccccagtatgaactccaaaccatgcctaacttctagggggccctaaaatgtctcttatccctatggaagacccttaaactttccccatgaaccccattagaccccaaaccatcttccacccctttgaccttacacctttctctctccttctcctccaagacatcctttggtttccaaaactccccaattagccccaattttttcccaccccctactagtcctgcccccttgaggaccctgcctccttcttgctccagttctttctcttggaccctgaaagtcccccctccctgtgacttccatagagcccagaatgccttgctccttcctagttcagacccctttgcccatcccctgtcccatagctgaaccccaccccttccctcaaaccccactgagtatctcaggccactctccttctctttctgagatattcacagggtccctaaacccagcaacttctcccctaaaaatctgtgttgtttcatgcagtgccccagattcctggggtctcaaacccttctcgttttggatcccactgtacagaggtcctcctctaaacccctttcctaatttttttttttttttagacaaagtctcactctgtcacccaggctggagtagagtggcacgatctcggctcactgcaacctccacctcccaggttcaagcaattctcctgcctcagcctccctagtagctgggattacaggtgtgcgccaccacgcccggctaatttttcttttctttttcttttttcttttctttttttttttttttttgagacagagtcttgctctgttgcccaggctggagtgcactggcatggtctccgctcaccgcaacctctgcttcccgggttcaagcaattctcctgcctcagccttccgagtagctgggactacaggcatgtcccaccatgcctggctactttttgtatttttagtggagacagggttttgtcatgttggccaggctggtctcgaactcttggcctcaagtgatccgcccgcctcagcctcccaaagtgctgggattacaggcatgagccaccgcacccagtctaatttttctttctttctttttttttatttgtttgtttttgagtcagagtctcactccatcacccaggcaggagtgcactggtgtgatcacagctcactgcagcctggacctcctgggctcaagtgttcctcccatctcagcctcctcagtagctgttttgtttttggttttgttttagtttttttataaatggagtctcactatgttgcccaggctggtcttgaactcctgaccacggtggtcatgagctactgtgcctggcctaaattatttacatgaagcccgccctatcccccagatcaagctcagctctgcagataactccttctggtgaaccttaaccccaagcgcaactctgagatgtccctggggacactcacaatccccctattctccagactccacccttcatcgccaccacccaggcagcatccccacctcccaccgtggttgctagtgctccctgctggagcttgggggtaggaataacaacaacaacacaagtgaacacatatacagcactatttatgtgccagaaatgattctaagggtttcacatctatcacttcattcaatctacacaacagccaaatgaagaggtcctattaccatccccattttatggataagggaaatagaggcacagagaggtttggtcacttgcccaaggtcacacagatagtatgtggcagaacagggtaggggtgatggggaaagagggtgagggtaggcctgggctggacaggagtagaaaagagagggagagaaaaaaagataataataagagagacagatggaagaagaaagaagctgaaaccgagggagatatgccttattcatagagccaatctggccctgtgagctctggtcccagctgaccctatttccaacgactctcctcttctgttccagcttcttcttcttcttttttttttttttctttttttttttagaaatgggggtctcactatgttgcccaggctggtctggaactcctgggatcaagtgatcctcccgcctcagcctcccaaagtgctgggtttacaggcgtgcaccaccactcctggcccctctttcagttttaacaatgacttttcttttcttttttgagacagggcctcactctgtcacccaggctggagtgcagtggcatgatctcggcttactgcaacctctgcctcccaggctcaagcgattctcctacctcagcctgagtagctgggaccacaggcgcccaccaccacacccggctaatttttgtatttttagtagagacagggttttgccatgttggtcaagctggtctcgaactcctgacctcaagtgatccgcccacctcagtctcccaaagtgctgggattacaggtgtgagccaccgcatccgaccccttgttcagcttctacgatgactttcctattcctccaacacaccagcccacagcagcagcccctgagcatatgcactcttctcccctttccatggctgctggttctttcttttcatgatggtcttaaatgtaatctcttcaaagagaccttccttttccatccccaatttacacacaccatccctacctgggcccccaaccagcagtctgatgttactttgaaatagaagaagaaggagaaggagagaagaaaggaagaagaaggaggaggaggaggaggaggaggggaggaagaggaggaggaagaagagaaaagaaaagagagaagaaaagaaaggaagaggaagaagaaggaggaggaggaagaagaaaggaggaagaagaggaggaagaagaggaagaggaggagaaggaggaggaagaagggtggctggatggatatatgatgaagtaataccttgacgtgtcagtggtggcatctaagtgatgggtatatgagtgttcactataaaattatttcaactcaggctgggcgtggtggctcacatctgcaatctcagcattttgggaggccgaggagggaggatcagttgagcccaggagttcaagaccagccgggcaacatagcgagaccccatctctaataaacttttatataaatatatatatagatatatatataatacacacacacacacacatatatatataattatttcaacttggctgcatgtttgaaatgtttcatagtaaatgttagggagtggggaagcaggactcttctggcggcaacaaacagccccaccaggtgccaccatttctatctagcacatcaccttatttatttcccttatagtatttatcactctctttatttttattttaaaaggaaaaaagagatgaggtcttgctgtgttgcccaggttggtctcgaactcctgggctcaagccatcctcctgccttggcctcccaaagtgctgggattacaggcgtgaaccactgcgcctggctcttgtcaccctcttattttgtttacttgtttacctatttattgttatttatttactgtctagtcattgaaatataagcctcccaagggaagtggcacggacaccaacatcttccagtgcccagaatagtgactgccacccaggaactcagtaaacgtgcttttcttaaagacagggtctccctctgtcacccaggctggagtgcagtggcgtgatcatggctcactgcagcctcgacctccccaggctcaggtgatcctcccacttcagcctcccaactacaggcacgcacccccacacccagctaattttttattttttgtagagaagcggtctcattatgttgtccaggctggtcgcacactctcggcctctaagatttccagcctcggccccccaaaatgtagggattacaaggtgtgagccactgcacctagacaacatgtgttctttttattttatttttatttatttatgtatttatttattttggagacggagttttgctcttgttgtccaggctggagtgcaatggagcgatctcggctcactgcaacctctgcctctccggctcaagtgaattctccggcctcagcctcccgagtagctgggattacaggcacgtaccaccacgcccagctatttttttgtatttttagtagagatggggtttcaccatgttgaccaggctggtctcgaactcctgaccttaggtgatcctctgggattacaggcgtgagccaccgtgcctggcccaacatgtgttctcaaatgcgtcttgggagaggactggggatctagtctggctccagactcagttcagggaccacaggaaggaataaataacgacctcttagcccaggttccctagaagaaaagggtatacccagcagctggagaatgtcccataaggtaagggaatgtgtgagttggcctgaaaaacgggcaacaggttgaactagacatcttaattgtttccctggagccctaattcctgccccaaacctaatacagaccctctaccaatcccattcttctggccccgccccaagcctaggccccacccccagactcttaggccctgccccaaagcaaaaactccagcccttttaaagctaagcaatgcccattccggccctttcaaggttaggaagtcccccaagtctagggcaccgactcaaaacttagggagcttggatctgtgggcgtttataggataggttggtggaactagaggaggcggtccccagtttgtactgcctctccagggaatctccccaaacccgaagacacgtcccattgtgctgactcctcattggatagtgcagtctgttctggcctctctgattggtccttccacaatccctagctgtactccctctgcattggactgcgcctgtgagccaccctttctgattggcccctgctttcccatgctttgctcctgatcgggcaagtccttgtgcatggctctttctgattggaccgtttgtaatcacaagcctggatgaaacagaagttccactatggagggtgggagtaccaccaaggaggacgaggaggaggggggggagggggagggggagagggaaggggaggggagggggaggggagcggggaggaggaggaggttccctaagtctcttgcctaagagagagtgtggccattgacccccaagatagcctgggcttaaagagttctaactgtacagaccacaggtgcctttggcttctatgcctcagatttttatcgtctttaagttggagagaataatagtacctttttcacgaggtattgcaataattaaataagctaatgcctataaactgcttatagaagtacctggtacataggaagccctcaagaggagggtcagctattagtattcatttgatcatgtaagtgcatgaccttggatgagtccctctgcctctctgacctctgcaggccaggagttccttgtccatttaattgaatgacccctcttgtctccagtcctcctcctcctccatctcctgccttcagggactgggcctgtgatcagagggagggacagagagatagggacaggaaaacagcactagtggagggcagaggagctcaacctaaccctccagagaatttagggcagggtgaattttctctatggaccagtgtagagtgattctatcccgaatccctcatgcaaaggacttgccctgattgggggtgagcgggcaagagatagggtagagtggggtggtaaggggatggtgtgttaaggctgggagggcttggagctgggctttttggaccctatccccggaaacaccaaggttgggggaacgggcagcccaggcccaaggtcactatgtctttgttaccatggcaacagccacctctctaccgggaacctgaaaaggggtggggggagggagttcccacgtccctgaaaccggggacagagaggggaacaattagaaacatggaagagaagcagagagacagaaagggtgtgattcatctctgtgaagacctgcccatctcggaattctcagagcccggtacattgtgggtacttaatcaatgtccctcagagacagacgcagaaagcctgagaaagttcgatgtcaagagatgccagaaaaaagaaaagaagaatcttcagatgggggcaagtgtcccttccctgtctcctcaatctcacacccctgggagtccaccgagggcccaggatcgacttcagcttccccagccctgggtgttcaggcctacctgaccgtacaaaccatccaccccccagcagctcctgagatcctgaagcaattacgttcaaacctcttcggcctttaaattcttcctatctaagggctcagctgagaaaagtcgcattcggtgatgcctcctaccccccagaggtggggagtgggggaggaaacgggcactttgcctcctttattctcaggggtccttgttccccttgggagtgaccgctctgtagatccagatatttccccaatacctccaggagacccaggcctcgcccatccgtcccccaccccccaaggaaatccttcaggcccttccctttctttctaagaaagaggtatcctccttccctcccgggacccagctcgcattcctctaggtcagcccgccccctgctggcccaagcctcgtactgcaggaaccgtcggctagagcccagaagaggcagaaactgagtccaaactgaggatctccgagtttttgcattttaaaatttatttaaagtcttggttgttcaggtcctaggggttccaagtccccagtcaccttgaggactcagacatcaggaattcagtccccagcccagagatcaacgaaagaaagacaacttttcttggagccaggcctcagtgaggtcatcagtggtgcggatttcgaacacctgggcagagagaggtctcggcattatgatctactcaaacactgagacagtggctgggcacggtggctcacctgtaagagagcactttgggaggctgaggtgggtggatcacttaaggtcaggagttcgagaccagcctggccaatatggtgaaaccctgactctactaaaaatacaaaaagtagccaggtgtggtggcgtgtgcctgtcgtcccactacttgggaggctgaggcaggagaattgcttgaacccaggaggaggaggttgcagtgagccgaggttgtgccactgcactccagcctggatgacagagcgagacccagttctttaaaaaaacaaaaacaaaaacaaaaaccactgagacagtgaggactctagtccctcttccctcagacccaggacccacaccacctctccctaacactctggagccccatcccagtctgaacctttgtgagctctgctgtctgcaccagcctgtttttactccctgcatacatcatctgttgttccggcttgcagcctgcgtggaaaagaggagaaaggcacatcagtggggacccaggcgtgttctctaaagctctagtaatgtcctgaaggccctgcagcttgccaagggtcctaggagctcttctaaggaggtccctgcactgtactcagtttctaggttggcttgggggcttcaagttattctgagggtctctggagatgatttaggggccagacggggatttctaggtgaaaggaaaaggtgggttggcttaggccccaggactgagaacgggtgggctcttggtgaatctgagcccccacctccacttcactgccctcccacatcatgcgtgcgacacacacacatcctcacccagtcacacacaggctgtcacatgctcacactcttacacaagtgcctgcacacattcgcatttacacacaaacacacacacacagaatcgaagaccctctcctgaggacagtagagctgtgtctcacccacagggctggagaagatgaaacacaaagggtaggacactcggccatcgtcatgcacgtacttgtagctgtaaaccacgaacctaccgtgaaagggaattgaaaatcaggactctggcctgcagcccaggcttaacagccattacctgagtccacagccttgaaatgttggctgagtctgagaacccagggttgatgtctgggactcagggtactgacctcaaacacaacaaatgattaaaaaataatcatagggccgggcgcaggactcacacctataatcccagcactttgggaggccgaggcgggtggatcacctgagatcaggagttcgagaccagcctggccaacatggtgaaacctcgtctctactaaaaatacaaaaattagcctggagtagtggtgggcgcctgtaatcccagctagtcaggaggctgaggcaggagaatcgcttgaactcaggaggcagaggttgcagtgagccaagatcacgccattgcactccagcgtgggtgacaaaagtggaactccatctcaaataataataataatgatagtgctcatttgactcacaattactttataatataggtgctattaatatccccatcgtacagatgagaaaactgaggcccaaagtcacttgcctaaggttctacagataggggagagatttgaacctgggaaagtgaatgccagcgtgtaagttctcaccccctatgcaattctgtccagtgcacttgaaccccaggtgcactgtgaccagtgatggctacagaatcatccaagcccggtataaaatgaaaatgtggggcatcttgttcaagaagcaggaaaattgttttcctttcttttgtagtctctctctagactgatcatcgtcttttttttttactgttattagagacagggcctcactctgttgcccaggctggagtgcaatggtgcgatcctagctcactgcagtcttgaactcctgggctcaagcaatcctcctatctcagcctccagagtagctgggagtataggtgcacaccaccatgcccagctaatttttttttttttttttttgagacagggtctcactttgtcacccaggttggagtacagggacgtggtctcagctcattgcagcctcgacctcccaggttcaggtgatcctcctgcctcagccccccaagtagctgagattacaggggcgtgccaccacatccagctaatgttttttgtgttttttgcagagacagagtttcaccatgttgcccaggctggtctcgaactcctgagctcaagtgatctgtccacctcagcctcccaaagtgctgggattacaggcatgagccactgcgcctggcctttttttaaaaaattttagtagaaatgggggtcttgttatgttgcccaggctggtcttgaactcctggccacaagcagtactcccacctcagactcccaaagtgctgagattacaggtgtgagccactgcgctcagcctgtcttttttagtttgctatttaaagtcgtgctccctcgggcatgaggatatgcgcaggcagagtgcagatgctcacaggaacaccctgtaacttgtcaggcaaggggtgccttctggaccctgaccctccctacaccagcaggaaacccaaggacagcagcggtcactgggtgggtgcagagagtgggtggctgagaacctgttcagggaggcagccaggtggtggactgcctgtgaacctagctccaaaccccagcacatttgtgtgaagtccattgtcccatctgacttcatacaaaacagaaattcaaagataaaactataaagaaggtgaccgttaacccccatgtgtgaggccccctcctgggtgcggggccctgtgcaattatcatatgcccatgaagctggtccttgttgagtcctacagcctctaatcctagagacccaaaatgaattcagtcaagatgaaaaatcttagcagaccagttttcacagaaatagtcaaagagctcttccaccaaaaaaagcaccaggctcatgtgacttcgcccaggattctacctgatagttaaaagtcgagtcattcctttagcagggtgcagtggcagtgcctgtagtcccagttacttgggaggctgaggcaggaggatggcttgagcccaggagttagaggctacagtgagccaggatcacagcactgcccaatagcctgggtgacacagtgagaccctgtctctaaaaatttttttaataaaataacaataataataattaatttgtttgctacctaaagtgttcccaaacattgaaaaagaaggaaaatttctttttttgtttttttgagacagggtcttgctctgtcacccaggctggagtacaggggtgctatcttggctcacttgcagcctcagcttcctgaactcaactgacccccgacatcagcctcccaagtagctggaaccacaggcacatgccaccatgcctggctaattttttttttttttaatagagacaaggtcctccaccaggcgcggtggctcacgcctgtaatcccagcactttgggaggccgaagcagggatcacctgaggttaggagttcgagaccagcctggccaacatgtctctactaaaaatacaaaaattatccagacatggtggtgggcccctgtaatcccagctactcaggaggctgaggccagagaatcgcttgaacccaggaggcggaggttgcagtgagtcaagatcgcgccactgcactccaacctgggcaacagagcgagactctgtctctaacaaaaaaaaaaaaaaaatagagacaaggtcttgctatgttgcccaggctagtctcgaactcctggcctcaggtgatcctcccgcctcaggctcccaaagggctgagattacaggtgggagtcatagtacctggccaaaatttcatttttaaaaaatgatgccagcgtaatgttgaaacaaaaactcaacaaagtttgtacaaaaaaaaaaaaaagactcttaaaccggtatcataaataatcggtataaaattctgcaataaaatattgctatacaaacaaaaagttctagagtatgaactcttggcctcaaacacagagattcttttttttttttttttttttgagatagagtctcgctgtgtcacccaggctggagtgcagtggtgtgatctcagctcactgcagcctctgcctgccaggttcaagcgattctcgtgcctcagcctcccaagtagctgggattacagtcacatgccaccacgcccagttaatttttgtatttttagtagagacgggatttcaccatgttggtcaggctagtcttgaactcctgacctcaagtgatccaccctccttgacctcccaaagtgctgggattacagggatgagccacctcactcggccaaacacagagattcaaagtccatgaatagggctggaactccagcagtcccttagcctatacctccaacatcacccctcccctcatggcctgatccaaccctttcttcccccaggatacctgggctgtctctccggcaactccattttgagctcctctggggaaatgttctgaggcaagaaaacagaagaaaagacaaagaatgaggcagggcgcagtggctcacacctgtaatcccagcactttgggaggccgaggcaggcggatcacaaggtcaggaaatcattcagaccatcctggctaacagggtgaaacccgtctctactaaaaatacagaaaattagccaggcatggtggcatgcacctgtagtcccagctactcgagaggctgaggcaggagaattgcttgaatccgggatgcagaggttgcagtgagccgagatcgcgccactgcactccagcctgggagacagagtgagactccatttccaacaaaaaaattagccaggcgtgttcaggaggctgaggcaggagaattgcttgaacccgggaggcggaggttgcagtgaatcaagattgtgccatagcactccagcctgagcaaaaaagatcgaaactccgtctcaaaaaaaaaaaaaaaaaaaagaatgaccacctttaggtgagcacttaccatgtgccaaggcatcgttctatgaaacacacatggattaattcatgcaactatcccgtaagtctgtggggtaggtcccatcattatgcccactatacagctgagaaaactgaggcccagaggtgttaaggcatttgcccaagattgcacagatagaaagcagcagagttgagatttgaatctgggttcgaatcataactgcttcactatactgcctttcagagggcctgagagagccccagcccccagtctccatggattcccttataaatccttatcgcaacactagagaaataagccttattatcattcttgttattgataaagacagtgaggccaccaggggggtgaggtctacccccttttttttttttgtagagatggagtctttttttttttttttttttttttgagacagagtctgtcgcccaggctggagtgcagtggcacgatcttggctcactgcaagctccgcctccggggttcacgccattctcctgcctcagcctcccgagtagctgggactacaggcacccgccaccacacccagctaattttttgaatttttagtagagacggggtttcaccatgttagccaggatggtctcgatctcctgaccttgtgatccgcccgcctcagcctcccaaagtgctgagattacaggcgtgagccacggcacccagccgagatggggtcttgctttgttgcccaggttggtctcaaaactcccagcctcaagcaaccctcccacctcagcctcctgtgtagctgagatcacaggtgcacaccactgtgcttggctaatttttgtatttttagtagagttagggtgttaccatgttgcccaggctggtcttaaactcctgggctcaagtgatcctcctgcctcagcctcccaaagcgctgggattacaggcatgagccaccatgcctggctagctttttaacttatatggaaactctttcatttaaatgccaataaagcattattatcatcattattaagatcatcatcaccttattgagcacatactaagtgccaggccttgttctaaacccattacaagaattaaatcactggatgtaaaaacaagcctatgagataagtactattctccccatttcacagatgaggaaatagagacacaaacaggcaaagtctcttgctgggggtcatgagtgagctagaacttgatctccagggttttttgtttttttgttttttgtttttgtttttgagacagagtcttgctctgtggttcagactgaagtgtagtggcacaatctcggctcactacagcctccatctcccgggttccagcgattctcctgcctcggcctcccaagtagctgtgattacaggtgcccaccaccatgcctagctaactttttatatttttagtacagatggggtttcaccatgtttgccaggctggtcttgaactcccaacctcaggtgatccacctgcctcggcctcccaaagtgctgggattacaggcatgagccactgtgctcggccaatctccaggtctttctacccccatgccaggctcttcatatcagttccaaccacttggttctcccagtctcaccctgtacctcccagtcccaatcaccccagcccatcacctgaaattcttcctccagcaccaccatctgccggtctttgtccaccttcactggggaggggtggcacacagggattagacactccccctgatccatgggggacacaagcccagccctccctatctgccctcaccaccgccctcccatccttctgtgggggaagatgtcactcacttatgatggctgcattgtctgtctcttttcggaagcggaatttcctcagcttttctgttagctctgggtctacctcgcacaccaccagggagtcagactgccggagggacccaggaagagctgaaatggcctggcctcagccctcaccccttccccaaacctgtttctccatccactaatgaagaggagcatcgcgccggcccatctgatgcctttgtgaacattgagaaaaggcacccttcccacagagtagatacccctcaccagggcactcagcttggggggcggagcagaggctgggttcccgccttctccacggggactcttgggggacactcaaggaggtgcagagatccacttcctgagcctaaacccagagccactgtctctctgttcttccagccgggctgttcaccacagttgggcccccttcccggcccgtgacctccatcccatagcctgaccttcgcccaggtgtcctccaagccccagccccaaccccagccccagctcttcccatagaacccctggcccctgaccatgattgttctgtccacaggcctcttcttttcttagttccgctgtcttctaggcgtggggaccggggctgtaggggggcgggctgtgcagtaggaggaaggtttcatccaacaccacatcctgtttatgccctttctgggacaactgtcacagagggctcctccccctccttccttcccctcatctgccaggacctgtcaggaaatcgctcagaccagggttccaaagcttccttgctgtgtgaccctagctaagtaacttcacccctctgatttgagattgtggtgaggatataaatagcttcacatcggccgggcatggtggctcacacctgtaatgccagcactttgggaggccgaggcgggcggatcacctgaggtcaggagttggagaccagcctgaccaacatggcaaaaccccatctctactaaaaatacaaaatattagcctggcatggtggtgcacgcctgtgatcccagctactcgggagtctgaggcacaagaattgcttgaatccgagcagcagaggttgcagtgagccaagatcacatcattgcactctatcccaggcaataaaaatacaaataaataaaaataaataaataaatagcttcacatagctgccagcatggcagacacaataggtactaaaaacgaactattttgctcctcccctcctccaggtggccttcctagatttacccccatctgggatatttgaattgcagggctggaaaaggggagtttagtcttttgctggtcagactgacgcccattatgtcaatggcaaaatggggaccagaggggcaaccccacagtgcctgggtaatggtgacttttttcctgcacttttccaacctcactagccttgcaatgacctatgaggccctacaacaagggagttcaatcccgtcagaccggtacccaattttttttttttgagacagggtctcactctgtcgcccaggctggagtgcagtggtgcgatctcagctcactgcaacctccgcctcccaggttcaagccattctccggcctcagcctcccaagtagctgggactacaggcacgtgccactacgcccggctaatttttgtatttttagtagagatggggtttcaccatgttggccatgttggtctcgaactcctgacctcaaatgatccacctgcctcagcctccgaaagtgctgggattccaggtgtgagccactgtgagccaccatgcccggctattttttttattgagtatttttgcactgcccccttttcccatcccgaaataaaattcctagataatataacctacttacacacataaattcaaaaaaaaatcaatataatgtcctgactgtcatataaagaagaaataaaaggaatgtagttcacacaaaaaccatatgtatttcagtgagaagataaaagcaaacaaaagacaatttccacagggtcctaggccaactgtgactggcccacttccctccatggtgggcaaaccccggaccctacactggactctaccccttcacctacatctctgcagctgtcctctctctccctcttgtctcaccaacgtccccatgcctcctggatctttctccttagcctccatgcagtgttacttcttccatcttaatttttttcttttctttttttcttttattttgagacagggtctcattctgttacccaggctggagtgcagcggtgtaatcatggctcactgcagtctccaactcctgggctcaagccaccttcccaccttggcctcctaggtagctgggactataggcacgcaacaccatgcctggccaattttacttttgatttttatagagacaggatctcgctatgtggcccaggctggcctcaaactcctggcctcaagcgatcctcctgcctcagcctcctggtgtgcagggattacaggcgtgagtcactgtgtctggcctcttccatcttaaaaacataaaactgtatctcctgtccagctgctgctcactcatttccttcccttttctgcaagatttctcaaaagaggccgggcgtggtggctcatgcctgtaatcccagcactttgggaggccaaggcgggtggatcacgaggtcaggagatcgagaccatcctggctaacaaggtgaaaccccgtctctactaaaaatacaaaaaattagccgggcgtggtggcaggtgcctgtagtcccagttactcaggaggatgaggcaggagaatggcgtgaacccaggaggcggagcttgcagtgagccaagattgcgccactgcactctagcctgggtgacagagtgagactccttctcaaaaaaaaaaaaaagatttctcaaaagaataatctacattgctgcctccaatttctcctcccagttttctcttctgccttctccaatcagcctttcacctgtattcctctcagctgacatgcccttgtcaaggtcacccatgcactccacggtgctggatctaatggtcaattctcactcctcctcagccacatctgacacagcccatcactccctgttccctgaaacatcgtcttcatgacaccacacttgcctggttttctttttttcttttctttttttttttttttgagacaggggtctcgctctgtcacccaggctggagtacagtggcaccatctcagctcaccgcaacctccgcctcctgggttcaagcgattctctcacttcagcctcccaagtagctgggattacaggcgtgagccaccacacccggctaatttttttttttttttcttgagatggagtgtctctctgtcacccaggctggagtgcagtggcacaatctcggctcactgcaacctccacctcccaggttcaagcagttctcctgcctcagcctcatgagtagctgggattacaggtgtgcgccaccacaaccagctaatttttgtatttctagtagagacggggtttcaccatgttggtcaggctagtctcgaactcctgacctcgtgatcagcccacctcagcttcccaaagtgctgggattacaggtgtgagccaccgcgcctagccatatttttgtatttttagtagagacagggttttaccatgttggccaggctggtctcaaaccctcccatgggccagacacagtggctcatgcctgtaatcccagcactttgggaggccaaggcaggagaattgcttgagaccaggagttcaagaccagcctgggcaacatagcaagaccttgtctctacaaaaaaattttaaaagtagccgggcatggtggcatgtgtctgtaatcccaggtaccagctacttgggaggctgaggttgggaggatcacttgagcccaggagtttgaggctgcagtgagctaggatcacaccactgcactccagcccaggtgacagagtaagatcctatctctaaaaaccaaacagcaggccaggcgcagtggctcacgcctgtaatcccaacactttgggaggccgaggcaggcagatcacttgagtccaggagttcaagaccagcctgggcaacatggtgaaaccccatctctactaaaaatacaaaacttagccaggtttgatggcatacggctgtagttccagctactccagaggctgaggcaggagaatcacttgaacccaggaggcaggggttgcagtgagccgaggttgcagtgagccgcgatcgcaccactacaatccagtctgggcaacagagtgagaccctgccccccccccccacacacacacacacacacacacacacacacaccaacaatgactaaaatactaagttatctgtcaccacccctaccccattgcctcttggaccttgtccttcactgccctcttttgctcactccactccagcaatgctggcccctttgtggttctgtgaatgatcctactacatggcctttgcacttgctgttttctctttctggaacccactttctccttcattccttcagatttctgtttcagtctcacctaatgaaagaggcctttccccatgtaaattaattctggctgcattactccattcccttagctgctttcttgttatttatttgtttatttatttagagacatagtctcgctctgtcacctgggctagagtgcaatggcaaatctcggcttattgcaacctccgactcctgggttcaagtgattctcctgcctcaccctcctgagtagctggaactacaggcacgcatcactatgcccagttaatttttggcatttttagtagagacagggttttgccactttggccaggctggtctcaaactcctggcctcaagtgatccaccagcctcagcctcccaaagtgctgggattacaggcatgagtcaccatgcccagccactgctttctttttctccttggtacttatcacgaagttacactgtatttccttattgtttgtgtccccaagaactagaatgtaagtctttttgttttttttttgttttttttttgagacggagtttcactgttgttgcccaggctggagtgcaatggcacgatcttggctcactgcaacctccgccacccgggttcaagcgattctcttgcctcagcctcccaagtagctgggactacaggcatgtgccaccacgccccgctaattttgtatttttagtagagatgggatttcaccatgttggtcaggctggtctcgaacacctgcctcggcctcccaaaatgctgggattacaggtgtgagccaccgcgctcatcctattgttgtgtttctagcaccttaagcagagcctggcacatattagatagtcaagaaatattattgaatgaattaatgaaccagcagttaatgagcacaataattctatgcagtgtgaaggctgttgcttaaatgcaggaggtagtggatggggtttgtgacatggccccaccctggtgaaacagcctttcctcaaagcgtctataatgccacactctcctggttttcctctctctggctgccttttgcaatattcatcgacagcgtcaattcctttgctcaaatcctgcctctctgtttcagggttctgttcagtccctgtctccagtgacccttcataccctccccgggctagacccctaactcccacagcctcaattaccatctttgacgatccttaaatcttggtctccagcctcaatttctcccttaagctccagacccagggtttgtgcacctcctggacctcgctactaggcatccacattgggcttagtatcttcccaacctgcttctggcgcccagtctcccggctagaggggcctggtcctaaacttttctcccccttccactccatagccagccagtgtcagggcccgttcgctctgcctccagggcgtccctcccacctgcacctccttccctccccacagtccctccctcgtgcaaaccccctctttcttccccaccccctcccccagctgcctccctggactcccgatcccgtttcattccctccaatccgccctccatgtataagccagagagacatctctccaaaaccccagactcaccatgatcctccccggcttgaagcccttcacggctccctagtgccctcgggacaagtccaaactccctcaagtggccaaacaactggcctctgctcgttcctcacccctccctgtcttcaactcgaccctccatcccgactgcctctctaagtgcctgtaacaagccagatctctgtcaccgagagccttctgaacacaggtccctctgattagttcacccggacccaatacagtttgtggaacgcacagatcacaaccaaagtcacagcaacaactcccgtttattgacagcctccttgatccttagcgctttctgtgcattctcttcccaccctaaaggctagatctcgcctcgccattcccatcggagagagcaagcggcaaggctgagaacagcgcgatgagaaagccgagcgcccagaagcccgagtgcagacgcccactgaggacagccttgggtgaggcgggccacccaaggggcggggaagaggaggcctggaacgcctgaatcaggaactgtgacttcgctcggggcagctggggtggacgcgcgcgagcctgccccctgcgggcctggaggcccaacctcagactccgccgggcccgttgccctgggcaacgccccgcgcgccccgccccttccccgccccccagccccaaaccccaggcctggccgactgcccgtcacccccacgtccgaccaatcccgccgaggagggggcgggcctcttgggccccgttccaccaccgtcgctcccccctcgccgcgaccccgccttactcggctcacacctcccgcccttcgggctgccctcgccgcccgttggctggcgcgccgttcgtcacccgggcgtgagctaatgccggcgcgcggcggcccccgtcggggcggggccaggggcggtgacgcacggcgcggtgacgcagcgcgacggcggcggcggcggcggcggcggtggtcggtgcgggaggagggaggggagcttgcgggcccgagagggggcgacggcggcggcggtggcctgaggaggcccgagcggcggcggtggcggcgaaggccgaggcggtgagtctcgggccgggccggcgcggggcggcggcgagtcggggcgcgcggggctcccctcagggcgacccaggccgcgcgggcggccccgccccctcagggaccccgaaccgcgggcggcggcggcgggcgggtgcggaacgcgggcctcggggggccgggccccacgggagaagccccgcgcccgtccccagtctccctcctgggccctggccgaagcttccctccgaaatctttctcatgccctcgggattgccgaggggccgggccgggggcctctcctcaggaccccccgcacatccccctcggagagccccggaaagcctgccgatcccccgtgtgcgccctgaaaggtccccgcaaaacccacccctcccgtggagtcgcctcctcgagcccttcatgggtcccagcagctttcctcgcagacccccgccctttggccccgaagcccccgtcctcctcctgtctccagaaatagtcctcggaggccactcctcgtccattccacagcgtggctctcatagctgctccaggagcctccctcacgagccctgcacacctccccaaggctccctccggacccctgtccattccagaactctcccccggagccctgcctctcacagcccaacaggctcacccgacttccccctcccggatcctaagaattttccctcccacttaccccattccagaaacctccttggagattttccgctcataccccctgcatttctgattccccctcccagaagtccttcagaatgcccccgacggaccgtgatcatcttccctgaagatctccttcccatatccccaaaataaatcttcctcacagactttgtgaaatgcccccagatcccaaaaactcacctagaagactccatccccctccccaccgtattgcaaccatctctcatacacactcccccttcacgtatccctctggacctttccacagatcccaaaagtctcccccagaggcctcctgtctccccctggtctcaccaccctaaaatgccctagagatcaccctcatgtagcccagtgatcttcaccgggatccccttccccacccccactcattctaaaaatctccagcaattgcctgaaatctccagaggactctcagcatcatattccaaaagcttcttccaaaatcccttttacatactccacatcttttccagtcccccacatcacacgctccaaaaattgtttaaggatcctgaaaactttcctcatggtttttctctcagatcccgtagaactccccttcactaacacctcagaatccccccttgcagaccggttttagaggaattttctgaagatcctcctcacaacccctgtaagaccgtaagattctcttggtgacccctctgatatgcaggttttcaggaccccccccccccacacacacacacagcttagagaccccagcgaccccctggagccctcctgacgtatgttcttgaaatccctccaagaccttcctgacaccaccagaaccccttgaatcaatacttctgccttactaagggacttttctagagatatccctccctgaacttgctcacacaggtcccctaaatcctctagaatcccttgaagaagaccctcacacacacctaattttcccccaaaataacccgagctcttgctctgagaaagtcctataattctttctgaaaaaccctctcctctgacactctctcagaagaccccgccttccccatatactcttttggagactttactcagctttctcctcaactgagatctctgaagagtttttcctaaaaacatccctctgtcatcccactccaggaccagtctcagaagaccacaccttcctcagacactttttagagaattttctcccaaattgccctccatcagccacccactcccagcgcttcctgagacttcctcagaactttccctcagattccacttctgacatccccaagaaacattatttaggaccctatcagatttacccactaactttagaattgctatttacaccctctcatttccccattctctttcctctgaagtcaactcagagacctttctcagggggcccccttttcccattatcccttcagaggtccccaacattctccagactcgttgcccaagagcctctatgtttccttgtaaagattcttgagagacacctttccccgcccccttgaaatcccagtgctccgagatctttctttcagaccatttttcttaggtgccatgctcatagacccctcttcccttcagagatcaagagacccttaacaccctccttagagacttaggattctccccatttccctttcagaagccttcttccttctcccctttgaggacctcctcaccaaataatcccttcccctatagcagtggttctcagtgtggttcctggcccagcagcagccacatttgttagaaatacacattcttgaatcccactcagatctactgaaactgaaaacctgggagcagggcccagcaatcaagagtttttaacaaaccctcctggtcattttgatgcacacgcaagtttgagaacctgtgccctttaggaggatttccttttcctcactaaaagccccctgaaagatgcctcagggtatgcctctgtgccctactgcccactgctgctttcctgtttcctaggaatcccctttatgaagtacccatcctccagaaagatttcttacctaccttgaaaggatcttggcttctccacaaggttactccatcctctgagcagttatttccgattctacttttgaatggtttcttttcagatcttcctcagtgctttctctttctggctacccctccagcccactaccagcctttggtgcttctttaaattgctgcttctttgaacacacatatccatctcttcttgtccatctgtttcttcacataggcaccctccccttgaggcaccctcaggaggtcttttcattctgtgtcttactgccaagacccctccacctccattgtacctcttagaacaccactcaccttcaaccttgtagattttaatgtacttgtccactcaccctcactggactaggaactctgaaagtacgggatgtgtcttgttcttctctgaatcccacaaggtgggatctactctttgtaagttattggaaatcactggagaataagcagctcttccttctgcatttggccagaaatctccaagttcctcagatctcactcctcattcaggtttagtacaccttccctgccccctcctctcctctcacctcccttttttttctccacacagcaccctttgcctttactcctgccctacttgctcctgtcttagggactttctttgtgctgtttcctgattctgagctaccccaagtcctttgcctggtgacctgcctcacccgtcctggttggcttctcttagcagcccctctcagctgctaagtctggagcctccacagagctcttggcattttttcaagggattctgtttctagggcccagaaggggaaacagagaccccagggtaaatattggggcctgccttcagggagctcacaataccagtagggggcttgggcatgtacagagcagaaaatgaggtacaaattatatgctgtagaaattcagcagtgagagggagccttttatttggaaagacttcacagaaaaggtggtatttgggctggatagtgttccatgggagttgggacaatgatggtgcccccaggcagaggaaacagcttaagcaatgggtcaaagacaaagcctcctcatctctcacccatggtatctcttctcttcacccaaaagatagagatgaaagaagacagatttcctccatttgcattgtatttgccagctgcactttagtgacctacagagtaataataataatgaccactggtttttgaatgctttctaactgccaggcactgtttaagtgctttacatgtattcataggaggtaggagtttacctaccctatgaggtaagtaaactaccattatcctcattttgcatatgatgagattaagaacaggtaggactaatagagggtctgtgggcactgtccattccaagatggtagtgccttgggtcaaaaagtttgatttttagttaagataggtttggctgcaatggggcagtagttgttaggtatgcagaccctgggtctggacaggatttgtatcccacattaccactcaccagttttgtaccctaggacgagttacttccctggtcttttagtttccacagctaaaaatatgaaggaaataatgatactttacttcatagaattgttacgaggattaaataagttaatacatgtaaagtacttagaacaatgtcttgcccataattgcaatgttagaaaaacaataaaataaaaaaaaagctcatatcagccagaactctaaaaacataaagtgatagaaccttagctcaaagtggtttaatgaaaaaagtgggggattaattggcttttgttactggaaagtccagagctaggttggcttcagacctagctgcatccaggtgttcaaataattttctcagtcatctcctcccatttctccactgagttagcttcatcctcaacaagcttctgctttggatgacaaatatggtcctcagcagccccaggttttaaccctacctccttggaaagccttagtggaaagagaactctttcttgagagtcccagtttgaaaatagtttcttccttgaatagatgtgagattatgccagaagatccttagaaacatattttgggttctgtaccctgcaactcagtctctggcttgctgagccaaataggcctgtgattccatccgatgaactttctgagcagtgatggcaatctccctccccactgtcccccagccgcagtcattctctgctctgtgattgtttgggtctagagagagcttgtggctggtctgactcaaccacactttgctttgggatatcacgggtgatatgaggtgatcagcctggcttgatggtggcctcaggggagcagaatccaggagtaatggcaataccctcaccacagtttaaggtttccaagacacagaactttggaagagagttaagtaggattgctgtgagtggagttttgttttgtttgttttagtgtaaacttgttgaatagaagcgggttcagggcaagttacagaacagcagtgtatggagtatgcaagtctcaaatatctccagcctgcactcattcattaatgcatggaggcactattctaggtactggagacagagcagtgaataaaacattcaaggtcctgaaattcatggaatttatattctgatggggggaggaaacaaaaaaatcagagtgtgattcatgctgtgaaggaaataaaacagtgtgaaagagagggtgggagtggccactgtagtagacagggggatcagaagaggcctcttttgggaggtgacagttgagcctgataaccagaaagatgagaaggcaccagttgtgggaagatctgggagtggaacattctaatctaagcattgttacatgcagaaaaaggacctctgcaaggtggggaaatttatcacagatatttattgagggcctgctatgtaccaggtgctatgctaggaattggagatgtagcaatgaataatatagctacagtcttcccttctctcatggatcttacagtctaggtgtttttggaagagctgcagcctttgaagaaacatctcttgatgatgatatcatagactccttcctactgggcagatgaggcagaatggggcacaggtgagcccagatctgattgatgagaaggaaccaaccttgtgacggtccggggaagagcatttcaggcagagaggtcagcaggtgcaaaagccctgccatatgttcagggaatcgcaaggaccagtgtggctaaagcctaagtgagggagaggggtgagggttggaaaggctgacagaagccagattacttgcagcctaagggccacagtaaggagtttctattttcatttaaggggattgggaaactattagaagggagtttttaaaagcaagacagcgacatgatctgattaatttttttagaaagctcactttggtttctgggaggaaaacagagggtcaggacagaatcaggaaggaaagttaggagacaatccatttgtccagatgagaaatggtgacatgaatgtggtggtggtggtggtagtgaagatgtagagaagcagatatattttgggtgtacagaaaacaggacttgatgatgggattagagaaagagaggaatctagaataatgataatagccaagtcatttatgcctcacaactctatgagagtaggcactattattattttctgtcttccttctcagtaggtactattattacacccacattacagatgacaaaacaggcatggcaaggtgaaatcacttgcccaaaattacacaggtagtaagtggcaggcttatatttccaacccggcagtctggttctagagccacttaggtttggggaaagataagcaaggcatgtgtagctgacattaagaaaaaagaaatatcaagacctaatgactgggtctttgggaaatggaagaagtcaaagatgactcaaaaaaatgtctcagttgtccacagagaggtgatgattgaatctacaggagttaattacatgcctaagtgagagaaaacaagtgtaaagaagggaaaggaagcagagaataaacttttcggggggaaggggtgtcaagacatttaggagtgggaggaagaatgctagcttcctctctattccagagtttaccggagctccccatactgtacttatcttccaggaggccctgcctggcttctcctctcctctccctcccttccccagcaccattcatacaaaaagctcattctttgctaatgcagtggtgtacatgttttgtgtacgtatttcaggagtttctggaaataatggttgattcttataagagaagttgtgctcccttggcttctgacagtctcttctcaggttatgaaagtgagttaaccctaggtaactagcctgttaccttgttcatgaagtgtaagttctcaaaggcctaggtcgtgctgtaaaaagaactaggaatgggtaagaaggcagataggatccccttattcatccagagatgttggtattaaagggcccttaggcccaactttcaccttgttgcccaggctggtctcaaactcctgggctcaagcgatctgcccacctcagtctcccgaagtgctgggattacagatgtgagccaccatgcccagctttcttgcattgttaagagcaagcaagagctctgaagccagactgcctggccttgaaaatctcagcttggtgtacagtcttgggcaaagtgacttaacttctctgtgcctcagttgctccatctgtaaaatgataatatattcatatatgtatgttatatatttttgaaatagagttttggggatcaaatgtgcttatctgtggaaagctgttggcaaagggcctgacaatgtatgatgtatgaagacatgctaagcatcatgcttgctattgaaatgaagtatagaggaggaaaaaagcatcatgcgcggtatttttaaatacattgtttcatttaattcttctaacaagcttcattgaggaagaaacagagttacttgtcatagtcaatacagcaagtaagtataacaggagagccaggatttaagccaggtctgactaactccaccatcctgcttctgaatgaagagagctggactccagaggcactgtttatgggcatatgggccttttctcactgtttggggccagagaagaagcccagagggcagtttgtcctggaacatctcagcatttttttgtttttgtttttgtttttgttttgagacaaagtctccagtcccccaggctggagtgcagtggcgcaatctcagctcactgcaacctccacctcccaggttgaagcgattctgctgcctcagcctcctgagtagctgggattacaggcgcctgccaccacgcccagctgattttttgtatttttagtagagacagggtttcaccgtgttggccaggctggtctcgaactcctgacctcaggtgatccgcccgtctcggccccccaaagtgctgggattacaggcgtgagccaccgtgcccagcctttctccaggtgggagtgcagtggcatgatctcagctcactgaagcctcgacctccagaactcaagtgatcctcccaaagtagctgggactgcaggtgcacaccaccacgcccagctaatttttggattttttgtagaaacggttttgccatgttgcccaggctgctgatctggaacctttggcttttgttttgttttgtttttgttttttgagacagggtctcactctgttgcccaggctggagtgcagtggcacgatcttggctcactgcaacctctgcctcccgggctcaagtgattctcccgcctcagtctcccaagtagctggggttacaggtgcacgccaccacgcctggctaatttttttgtaatttttgtagagacggggtttcactgtgttgcccaggctggtctcgagctcctgagctcaagcgatccacccgcccatgcctcccagagtgctgggattacaggcgtgagccactgcacccagccctcttagccattttgttaacctcatttcccacctctggaggtggtaggggcttcccaagaagatcacttggacctcttcaagtatggtggcaatattgctgggctgttggagagacttctgttatagaggctcccctcttgtgtttttcctcaaaggcaaggagtcatttttggtcacatgaggacaaagagaccagaccagtagtgcattctgttttgcatgggaattgtcaaggctctttcagttttaactgaaacccaactcaaactggcctaagtcaaaaacgaatttattcatctatgtaactgaaaagagtgggccacaagggggaggcttcaggctagctgcatctaggttttaaatcatgtgaacagatctccctttccccctcccccatctcttgactttgctgtcatctgttagtttcattctgaagcaggcttccaccgtgaaatagaagaggtggcaactggtgacatcatgagacgatgtgtaatctgagcaaccctaaccaagaacttattttccttagtagttccagcaaaaatccagagaggactatccttggccaggctttaccccatgtccacttctggagccaagaaagacagttccttctccaaggggaacccagggtgttgatactagaagatggaaatggatacagtaagatgctgccacagtgagatgcctcacccaggtctccctctgtcacttcagccaagcacatgggatagaaagtagcaggcggcctctggccctttaatggaagagggccatccagtcctctccagttaacatctagaccgaacacaaagcatccttctctcatccagaagacataggaaccctaccttcagggatgatttttttttaacagtgaaatcttaaaagtaactgtttcactaaagcctccagtatttactgaagactgtcagaatcatcctccatcactagatcttctccaccagtcatgttccctgagcagtggggtggcttgaaggtataaaccagagaggcccaagggagggatagttagcagacttctggtctttttctagtttgtgctcttctgttccaaggaccacaggtatgtcttcttctgtgtagttgttcactattgtttcaatgtgattcgtttcccacatttgaaaatagggggggattttactttaaaattcagatatctggctcctctttaggggaaaaaaaaaaaaaaaaaaacctaagacgtaacaatactggacccacattccttcatggtagcagttgataagaggtggatagtgacttctcccttttgaccgggtgtggactttccaactcaccatagtcccagttggcctgctttgttcaaagcctggccttgtaagcatcatgtttgagaccctattatgtccgaaagctttgcttctatcgtttggcctggggggaaaagctggattaatgtttagtcagcagcttattgggtgggtggagggggggaacagtgctgttgcttaggaaaagtaacaacccagtaaaagaatttatgggaaagagtgtgcacaactttggtctgtttgtggatttggtcgtttttttgctgtaaatgctgttggtatatcaaacctcctgtcacaaatgttccctctgaaatagtaacatgtccttctatcttatgagttgccacccagtgaaggaatccctcccactcccgagggatgttcatccagcctccgcttgaccacttccagcagccagggagcttattacctcctcacatggcagccagttccattcttggacagatgcgttattttaaaattcttccttatgttgaagcagctgctgcctctttgggactgaaagccacaaaatgctggagctgggaaggaaaaccgatttttttaggcgcgtgagctaccactcatccaccctgcatccagggcaaacattgataattaatcacagcactctttctcactgagtcaggaagtatgctgccttaaaattgtttttaattaaattcttttttaaaaattacaaaagtaatatgtattcacttgcaactagtgaagtagtacaaagttatataaagatagtgttaataatccccctgtttctccaagatagtgttagcagccgagggtgtattcttctatacatttatacacatatagacataaatattcatatataagatatataaggggttttgtatgtggcttttttttaatttaaaaaatggcattatattgtacatattactgtgtagcttatggacacccctccaagtagttacagatcaaacattgtatatagctttgtttttttgttttcttgttttctttttgagatggaatcccgctctgtcacccaggctggagtgcagtggcataatctcggctcactgcagcctccacctcccgggttcaagcgtttctcctgcctcagcttcccaagtagctcggactacaggcgcccgccaccacacccggctaatttttatatttttagtagagatggagtttcgccatgttggccaggctggtctcaaactcctgacctcaagtgatctgcctgcctcagcctcccaaagtgctagaattataggagtgagccaccacacctggccagattaggcatgtttttaatagatacgttatatcatacaatgtgggatctgccccagtttattaatcattccccattaatggatattcccattcatttcttcaggattcttctcatcgcagtgctccaggcagccactaccaatcgattggagttagcctgtgaggtaaaacctatttgtcatgtctcacccagtcccgctccttatcctacattctagagaagagaacagactagctccgtgatcaaagtgaatcagtggcttgggcaggactagaactgaattttcttgactttcagcatttcctctatcccatgttgtcactcccttggagtcatctaccctgcttttctcctctagagtaaaagaacaaatataatttcttttctgcgtgctacctcttcagatattcaaagtcagttatgccattccccttgagtcttctcttccccagaggaaaatctcagtgccttcaatttttttttcttaaaacaaggttttcaaatccctttaccatcctatgagctgttccttctatcttcttcccccctagggctatagaaatcccaagtgtggcttccacattcaccttctatagctatttatttattcaataaatatatattgagcaccttctacgtgccaggcactgttgtaggcactggctgactgtatggcttgcgttttggtcagtagagagaaacaaataagatgatacctgagagtgccaaattatataggaatgaaatagtgttaatataattggaggagtaactcctgagattggatggtcagggaagctctctctgaagaaatgacaatgagctgagacctgaatgacaggagccagcttctaggggaagacagttccactgaataagaaataatttggtacaagatgaggttggagtggccacaggagtcctatagggctcggtagttcaagataagatgtttggaatttgtttaaaatttttttttctttttttctgaggcagagtttccctgtcacccaggctggagtgcagtggcatgatctcagctcactgcaacctccgcctcccagcttcaagcgattatcgtccctcagccccccaagtcactgggattacaggcgtgcagtagcacgcccggctaatttttgtatttttagtagagacgggatttcgccactttggccagtctgatcttgaactcctgacctcaagtgatccacctgccttagcctcccaaagtgctgggattacaggtgagagccaccatgcttgaccttatttagattttatttaagtgcaatgggaagtcattggagaattttaggccagggaggtgacatctgatttcccctttaaaaaaaattgctggacgcttgtttaacttggagcaaggtttcattttccctcatacctttcctgcttcttacatccaaagggattggcaaccaggccagttcagtctgtttaggggtcccacaggggatctgtgaggcaagtcacagctgttgcctaatgcaccccacagccctcctcagcaagcgcacggaagttcagagagatgtgagtagctcccttagacctgagcccagtaggttcaatgggtctttgtatgaagttctcagtccggggaaccttagtcctttggcagccagagggggatggagctgaatgtggtttgaggatagagccaagggcactggttgcaagagagacagatggaagaaatgttgagtggagatctggagctcgagacacttagaaaaagccttcggagtggtgtccagaaaccaaccacctgaaaaataggtctgttgtttgcccagttgaaataacttttctttagttcctgcctaagaggggaatttggacactttgtagcttgtgagtttttgacttttgatctgtccccttcccctcaggttggcattttctttgcttccaggaggagcctgagacaagctggcatctctggaagtcggggacttcccaaccagagagtttaggtttggagtcttcaggggaattaagagggcagggagcgattcacctcagaatagagatgggtaaaatctgataaatcagagttgtgccttttccagagtcagggaagctgggttagagagggtgagattccctcagcctgttggtgatctttgaaaagccctttgtccatgcccacacctgatagatacccagccagttactaatcagatggctggctgcatacctgagatctccaccagggtcactacccgaccatccatcctctacccagcattgtgggtctagcttgaagtaatttaaagagcccttggagtcctatcagtaggttaggagtcacactgcccagctctcagagaaggtggccagaaaccagcaaggtcagagatgtgctgtgcttagtcatgtcaccttgggccagatcgccatcaattcatatcttttctcataatttgcagcctactatttcccacttctgaaaaatttttccaatatattttctgtgttaaatccgcttcctttgacactatgacagccaggtgtgagggccaacatctccttggtctctgggataggcatctaagtcccagtcacgccttttctctggatctgaagatttgggtgaaagtagctttaatatctggtgttggcttcatgtttcttccaggagctcagcagagcaagtaccctgaaagagaaaggcatgaggccttcatgccccctcaacccacactcaccaggcaagtttcagccccttctttctgtttgacccctttgcttcctttttcaggaaactggagaggcgtggctggaccaagacctccccccatgtgagcaggcttcctcctcccccaacaaccgttgccaccacgcccagaaacgtccttaagccctggccctcaggggaaaggtaacaggaggccagagccgggaccatgtgacggcgctggccctcgccaccgccgtcccccgaccctggccccaggcccggcaccatgatgttccgagaccaggtgggcatcctcgctggctggttcaaaggctggaatgagtgtgagcagacagtggccctcctgtcacttctgaaacgggtcacccgtacccaggcccgcttcctgcagctctgcctggagcactcactggcggactgcaatgacatccacctgctggagtcggaggccaacagtgctggtgagtttccacccttagagatgggagcacagcaggagggagacctggaacagatgtcacatggctaagaaggtcaacccaacaatgggactaaaaaacgtgggttctaggcttggtgggtggggagttccttaccttctaagttgtcatcatgggtcttctgggactgtgttgccataaatcctcaggcatggtatggtggacttatgggagaaggcaatgcaaactggaaactccccataacaggaagatcatgtagagtggcttatgtgggctgctgaaaggaacagactaaagtcattatgaaaggcgtatagaaggtgagcagtaattaatttcttaagcttcaggatatcagggctaggagggaatttgagaactcttccaaaattcatgtcatcctatactattctttaccctcaaaggtaggttggacttaaagcataagcagcttccagaaagttttgaatttagatacagttcatcctgtcagttccctaagtacttattaggcactctgtgtcctgtgagattggcattgggatgggtgagccaggcttctcttaagacctgtcccttaggccccagttgtagacaggagtcaggctagaatcaggggctactgctgaagctactctagctgtctgggcctccacagggctggatggagagctgttggccccagtgacagatgggagagatggaggccaaagaagagggagggtagtggatacccgaaagctagctgggaagggcatcaaggggctccatgcagtttgtccaaattagtcaccctaactctttgcaccttcttcttcagaataatagttcatattgagcctttacagcaagccaagtactgtctttacttgtatattaactttaaaagcagtgttcttggccagatgcagtggctcacgcctgtaatcccagcactttaggaggctgaggcaggcagatcacctgaggtcgggagttcgagaccagcctggctaacgtggcaaaaccccgtgtctattaaaagtacaaaaattagctgggcatggtggcaggtgcctgtaatcccagctactcgggaggctgaggcaagagaatcgcttgaacccgggaggcggaggttgcagtgagccaaaatcgtgccattgcactccagcctgggctatgagagcgaaactctatctcaaacaaacaaacaaaaaaagcagtgttcttacgtggctctcaagtcagactgtctaagtttaaatcccagttctgttacttgccatataaccaagtaacttaacctctctgtgcctcactttcctgcgcgccaccacgcctggctaatttttgtatgtttagtagagacggggcttcaccatgttggtgagtctggtctcaaactcctgacctcatgatctgcccacctcagcctcccaaagtgctgggattacaggcatgagccaccgcacccagccagtttcctcatcttaaattcaacatgatatcctgagaagtatgtaacctcagtaaaaaaaaaaaaagaaaaggaaagaaaaaagatgataattatatctaccttctagggtagttgtgaggattcagtgaattaacacgtgtggcttcctacatgcctgacatgtagtaaacaataactgtcagttgttaattgtcaataactcacttagtcctcacaacaaccccatgaggtaggtcctgtcattagccccattttacaagtcaggaaacaagcatggactgctaggattgggttttggggagccacacagctgcctggcctccctcatctccccaggcccacctgccttagcaacagtcacccttattttactgagtttttgtgtggaagtcacagaagcagcatgattgtagcgggagacggttactcaggccaggggtcacatcagcttagttcctagtctggcagtaagttcttagtcctagacaaagagcaataagaacccagctcagctgcagcaggctcggagctcagccatttctcacccctgccacactccccaccactctaacactaaaggcaggagttctgtttgtgatatgactctgcctttatagtgggggctcctgtggggcaggccagtgtcttacacagcttcgtcacacatccccactgtcccatcctgagcaggcagttggattacctctgggtgccactcttagctgtatatcagaatcaccagtagtacttagtaatttcagtgcttttagtttttgcttttgttttcagaacttgcagtaaaatcagatagtacaaaaggtgaaagtgaggtttttcttccagacttcacgttctcatttccttatgttttatgagataaattccctgcatatatgaatgcatatatattttccttccaactttgtcattgttttgtcttaatacatatggccaaacatgcatattaaccagtttggttttttcacttaccaatatgatttgaagatcattccgtattcagcacatacgtctgtttctcgttaagtatttatttacacctcacaacaactctgtactcccctgttactcccccattttacagaggagactgtaggtctggagatattaaatgacttgctgtgggtcacacaattgataagaggtagagttcaaatttgacttcagagttctttagagctcttgaccaatagactcttccacatggtacatgtggtcttcatcttacaaacagtgatgtaatgagtaccctttaaacatctctaggatgaactcctcagattctgcagaactgctagtttaaaggtgtatgcaattaaaatatttgttctccaggccaggcgcggtggctcaagcctgtaatcccagcactttgggaggccgaggcaggcggatcacgaggtcaggagatcgagaccatcctggctaacacggtgaaaccccgtctctactaaaaatacaaaaaaattagccgggcgtcgtggcgggtgcctgtagtcctagctactcgggaggctgaggcaggagaatggtgtcaacccgggaggcggagcttgcagtgagccaagattgtaccactgcactccagcctgggcgacagagcaagactccgtctcaaaaaaaaaaaaataaaaaaataaaataaaatatttgttctcaccacattgcccttgaaagacatgctgcattttatacaaataacctgaggcccgttcccagatggtttgcagtgggatattggtggtaatgcctagccagggttgagaagtgctgtgaaatgaattgaatgatgaatgaatatatgaatcaaggtttttatccatagccccatatcagatggtgagaataacaagctggtacttaaatgggtggagaggaaaggaaaacttagaatgagggaaggccatggtgtgttccagagtcagcaggaagcctgccaggactggagcaaagcatgacttgaaagagaagtgatcacagaggtaaattctggtagagtcttgaatgcctgttttctagtagacctgagggctctaagactaagaagcaggtgcctcctgtttcactcctaccctcaagtagaaccccacctgccttatttgtaaaggaaggtgctactttctgggcctggagacctgcctcaaagaaggagctgttcatactcttgtttctcctctggttattatggccttcccattccctggtgtttctcaaacttgcatcatcatcagaatcactggggttaggtgactgttacaatccagatttctgccccccatagacctactaaatcagaatcctgagggtatgggcctgggaacgagtacccaggttcttctgctcaccaggcagtgtgagaggtgatgccctgctggatgattcatttgttgtgagacatgagacacccaagagttgtagatccagctctccactaacacctcttgtgacctgggtcagtcctgcctgaccctctcgggcctcaggatccccatttggacagtgagggggttgttctggtactttccaggtacttcttgggctctgaaataatgtgccaaagaagacagagccacagccaagcatactactttcttttgggagaggcccagcacattattctagggcaagagttcttaatatttagcgggatggaccagttagaaaatcttcccctcctccccaccctccccaaaaagatgcacacctactccacaaaccaactcttgagttcagttggttcactagtccccagttaagagttccctggccgggcgccatggctcacacctgtaatcccagcactttgggaggccgaggcaggcggatcatgaggtcaggagattgagaccatcctggctaaaatggtgaaaccccgtctctactaaaaatacaaaaaattagccagacgtggtagtgggtacctgtagtcccagctacttgggaggctgaggcaggagaatggtgtgaacccaggaggcggagtttgcagtgagccgagattgcgccactgtactccagcctgggcaacagagtgagactccatctaaaaaaaaaagagttgcctgtcttcccggccgggcgcggtggctcacgcctgtaatcccagcactttcggaggccgaggtgggcggatcacgaggtcaggagatggagaccatcctggctaacacggtgaaaccccatctctactaaaaatacaaaaaaattaaccggacatggtggtgggcgcctgtagtcccagctactcaggaggctgaggcaggagaatggcgtgaacccaggaggcacaggagcttgcaatgatccgagatcgcaccactgcactccagcctgggcgacagagccagactccgtctcaaagaaaaaaaaaagttgcctgtctccaagcccttctttagcttggtcccttcaaacctggagagctgaacagtgaggtagatcccctgcttttttgtgggttgtatctccatgtcccaccgaaccaaccttagtacttcctccagttctccagggagaccttgggtgtgggtcagagctgcccagttgtctgcttcctgctcagatagatcaggtagcacagagctgacctaggtgaatatgtccctagctttgtgttagaatcccccagggcctttctaaaaataatgtgaagcccaggtcctatccctggagatttaaagctccctggttgactcttgggtgcacccagtggagaaccacttgtcttgatgctgacgctgattttgggtaggcccgggaagctggtgaggatactgttgtgtgacctactagaagtggggagtcggggcttatagctgtggaaagcctggcctaggtcatcgcttcctctcaggcagctgggaaggtatagggaagtcctccagcacaggcagccagcatcagtttcatggaagtaggacatgaggcgcaacacctagaaacagaaaagcaatattccaagggtctctggaacagggaagaagaggtcccaggttaccccttgttgtaatccctgtttgttctccaggtgctgtcttccctgcctctttggagctagaacaataaccctggtcctctcctttcctctgatgctgacttggaccagaaggctgttcctatggacaggaggaaggagactaggggggtcaggggagctgaattccacttccctccactgtcctgtagcttcctgggagacatttcctgcattttcttcccacctcctattctgagtcagtccccatatctagcaggtttaaactcctccctctctggctcattcagtctgggtggggaaactgaggtcaggaggggcaatggcaagtgagtcatcagagctcagccctgtcctccaccctccactttcaggctctgcttgacagttcatcaaacaaaaatgtgagccccctgccctcccctgtgtccatgtgagcaggggtgaggcagagaaggtcatgtttagagccaaaccctagcccctctgactggtgcctgaggctactccaattgttgcaccaggccagtacataaaaatgggtttgctcttagagcagtctcgattggtgcctgtaatttgccaggacccagggtcatgacctacttagctctagtcacctggccagctctgccctgctgccactatagccagggaggacatttatacgcacagcattcctcaacctctccatgtttgcagagtccaagtttgcagcttggtgagaagcagccgttggtgtcttggcattccccagccccttcccccatctgcccacctccagaatttcatcattgcttgttgtacttctagctccaaggaatcagagatgtgtctgtttttggtaaataactgtatgaaattccccacccctgtcgggaatcttaaggggaaggcccagatgtgcttttgtacatgaactgttcccaccagccctgaaacagcatgggctctagattcaacgaggagcaacaacaataatagttaaaatgtacttgagcacttaccacatgccagacgctttgcatgattgtctcattgactctttacaacaatcctgtgaggtagaggccttacagtccccatttacagaagagaccaaggatcagagaggttaaaggactggcccacaatgatattgagttaggtcatggaggcagagctagattttgaatccagcaagtttgcctgttgaacttgtgctcttacttagtatactctgctaggacctgagacagagtacaccactaccttccaggggaccatctgggttcaattgtgcaggtattcgttgggcctctgctgtgcctccactctgggccaggctttttctgatctgggcaggaaactagaagttccatccccacccattatttacagccccagctgggctcaccccaaggggcctgaggctgcacaaattacttgggccagttccagtgctcactgatgcttctcagtcatgggaggcccgccctccccaccaccaccacacagacacatgaacacacatttccccagaatcagcctccatttgtccaaaaccactctcccctttctcggcagcagaacaaggtcctgcattgagcccaacccttggggctgttctgtcatgtcccctggcagtaccagagaagctgtgtcccttagccctggggtcctggcagtactctggagtggggaaaggactagacaaggcttctctctgtcccagatgcctctggctatgctgcaaggcctaaacaacagcgattgagaatgtcagggtagggctggaggggcaggctgactcgactactggagaagagaggaaaacacccgtcactgagccacagactgaatgtttactatgagtacactctgtcagatgcttttcatgcatcatctccctacatcttctcagcagctttataatccttactttacagaggaggaagcatactgcccaggccactgtgtgtttttgactggggtgcatatccttgacttatttttatttttttttattttcattcttgactttctgtccctaatgggaatcactgtctttcttctttctcatcaagaactgaaaactacaggactaagttatcaaacagggtaccacagagttcttatcgtttgatccagtgccaggtggagttgggagggcaggaaagacaaaagttctgtgacttcagtgaggccttttctgccttggaaaatgatctttagatgtggagatggcctgaaggacagcttcataatcttggcagtcggttcaagtgaagacagacaagggaatgaggtttcctagctttgagtggcagatgctgaaggggatctggaaatccagggaagaagagagacttgggattggagagataaaaggttgtgggtaaaaagttcccccctggctgggcgcagtggctcacacctggaatcccagcactttgggaggctgaggcaagtggatcacgaggtcaggagatcgagaccatcctggctaacacggtgaaaccccatctctactaaaaatacaaaaaaaaataaattagccgggtgtggtggcgggcgtgtgtagtcccagctactcaggaggctgaggcaggagaatggtgtgaacccaggaggcagagcttgcagtgagccgagatcgtgccaccgcactccagcctgggtgacagagcgagactccgtaaaaaaaaaaaaaaaaaaaagttcctccctgccggacaccatggctcacacctgcaatcccagcactttgggaggccgaggcaggtggatcacctgagtttagaagcttgatactagcatggccaatatggcaaaagcccgtctctactcaaaatataaaaattagccaggtgtggtggcgtgcgcctgtaatcccagctactggtgggggctgaggcaggagaattgcttgaatccaggaggtggaggttgcagtgaaccgagatcatgccactgcactccaacttgaacaacagagcaagcctccatgtcaaaaaaaaaaaatggaggcacacagagcctggattcagatctcagctgtgtcgcttaatgggctctgtcacttagggtgtgtgacctcaccttcccaaatctgttttctcacctgcaagatgagcacaccaaaacaggattaaaacagggatgaaaagcaatcatttttagcatagtgtctggcacatagtaaatgctcaataaacagtatccttcattctgaatgaaagtgccatatgttattgctattgtcagtagtagcaacagcaatagtggtattggttctactattaattttaaccaatgctgtagacatagtatgagttgatgactttgaatgaatggatttaacaggtgttcccttggctgggcacagtggctcatgcctgtaatcttagcactttgggaggctgaggtgggcaagtcatttgagagcaggaatttgagactagcttggccaacatagtgaaaaaagtaacaggcaggacacggtggctaacgcctataatcccagcactttgggaggaaaggtaggtggatcacctgaggtcaggagttccagaccagtctgggcaacatggttaaacgccccctccactaaaaatataaaaattagccgggtgtcatggtatgtggctgtaatcgcagctactcaggagactgaggcaggagaatcgcttgaaccccagaggcagaggttccagtgagccgagatcgtgccactgcactccagcctgggcaacaaagtgagactccatcaaaaaaaaatagccaggcatggtggtgcacgcctgtaatcccagctacttgggaggccgaggcaggagaatcactttaacccggaggcggaggttgcagtgagctgagatcactgcactccagcctgggcaatagagcgagactccatctcagaaaaatagaaaacaaaaactaacaaacaggtgttctctcttggaagcttagagcaaagagccccaggccaagaaaatgcacagtctttatagccaggagttaggaactgtgtgagattcattttcctaaggctacaaacttaagcagaattaggagtgtatgtgaattctaggccacagagttctaaggggatcattaagagaaatagggctacagacagggcatttctgagtttgtatgcaaggccaggtgtccatccttcagtgtgggcagaggagaccagaagtccatggaactttttttttaagtcaatcctgaagcatgctagatgtccttggaatcgtaaaggcctaaggaacttgggttgaaagaccctcagatgtctaggtttccaagactttccttataggtgcttattcctagcctcttggtttcctgggcccagagatttggcttgtgcctttagaatctctgtgtgtatctgaaaggagggagacacagtgagatataataaccacaatactagtaaaagcagctagtgtttactgaggacttactctatgctgtggcctcacataattcatagcagccatgccaggtaggaatgattctgggctccactttacagatagagaaaatagagctcagtgaagtgatcacacttgcccagagtcacatggccagtaagtggtggtaaagggacatatgccacatctctgcctattccttttcatcacccactcctttggggtcctagctctgtctggttagagccagctcctttgcccatttccaagacctcaccattagcacatctctcagaactcctttgtgagatatttgtaagtcatcaccttggctacagatgtgagctcagttgcccaagggtgagagcgtagttggcctcagacctaaatctttgtctcttttcccaagtattggtattttttgtccctctccttgtcctgtcagcattatctccatcttccaccctgtttagctagtcacagaagtgctaatgaggttttttttttctttttcttttttttttttttttttttgagacggagtctcactttgcccccaggctggagtgcagtggcgcgatctcggctcactgcaacctccacctcccgagttcaagtgattctcctgcctcagcctcccaagtagctggaattacaggcatccaccaccatgcccggttaatttttgtatttttagtagagacaggctttcaccatgtcggccaggctggtctccagctcctgacctcaggtgatccacctgcctcagcctcccagagtgctgggattacaggcgtgagccaccacgcccagtgctaataaggtctttgagggggagagtcagacttgtaacagttcctacccaagccttctttgatgtggccagcctggggccatattcttagggacctcccttgtgggttgaaaggggaaacctgaggccgggcgcagtggctcacgcctgtaatcccagcactttgggaggctgaggcgggtggatcacgaggtcaggagatcgagaccatcttggctaatgcggtgaaaccctgtctctactaaaaatacaaaaaataagctgggcgtggtggtgggcgcctgtagtcccagctactcgggaggctgaggcagtagaatggcatgaactcagaaggtggagcttgcagtgagccaagatcgcgccactgcactccagcctgggcgacagagcgagactccgcctcaaaaaaaaagaaaagggaaacctggcttatctccacagggtagactcaggtcctcacacagtgggatagaaaggagaggtcaagatgaccatgacatggaacagccagggaatgcttcctggaggaaggtagtaagttaggccatctacaaaagagaatttgtataggaggaaggaggttgttgcgggccaaaaccttgaatctcagccaaggtgtggagcttggataaatacatactgtggagagaaccccaaggaagatggggagatatcctgagctgagtctttatctggaggaatgggagatggagggtgccctggaaatgaaggtgatgttaggctaggagttcttggacttgagtctgttggtgcttgctggttgccattataaactcctggtcaggaacatgacatcctgttgtgatttaggaagataaatgcatctggatgtatgggatcgattggaaggggagaatctagaagcagagagaccagttaaaaaacaatagcaagcatttattatgtcgccaaaccactttgtgttctttgctagctcattgaatctcaaagcaacactgtgaattgggtactgtaattatctccaaaatttcgcagataatttagtgctccatgaggttcaaggtagcttaccaagatctagctagtaagctggggtgtctagaccatctgattccagagcccaagcttttaactaccatataccactgccttctccattcaggaaggagactgctttttggcaggggaaatggcatagaggccatgaagaatggaggaaggagtcatggagataaagcatgagagcaggcctggggacaggagttgttcagattccagagtagcaagtttggctgattgggaggcactgcaggtttctgagaacaggagtgatagaacaaagaaaaattactctacaccagctgtggtgggcacatgactgtagtaccagctacttgggaggctgaggcaagaggattgcctgagtccaggagttctgggctatagtgtgctatgctgattgggtgtctgcactaagtgtggccccagtatggtgacctcctaggagtgggggaccaccaggttgcctaaggaggggtgaactggcccagtttggaaatggagcaggtcaaaactcccgtgctgatcaatagtgggattgcacttgtgaatagccactgcactgcagcctgggcaacatagtgagaccccatctcttaaaaaaaataagacaaaaattactccagaggcagggtcagtgtgtttgatctcacctatatgagggataagtttgggagttatgaaaagaaaatcgttatgaaaagaagattggagctgagggaataggccataggcagtgctctcaggtgaataggagtaccccaccctggctctcctgatatttcttcttatcccttctgtagccatcgtcagccagtggcagcaggagtccaaagagaaggtggtgtccctcctgctgtcccaccttcccctgcttcagccaggcaacacagaggccaagtcggagtacatgaggctactgcagaaagtgctggcctactcaatcgagagcaatgctttcatcgaggagagtcgccagctgctttcctatgccctcatccacccagccaccacactggaggaccgcaacgcactggccctctggctgagccacctggaagagcggttggctagtggcttccgctcccggccagagccctcctaccattcacgtcaaggctcagatgagtgggggggccctgcagagctaggccctggggaggcagggccaggctggcaggacaagccaccccgggaaaatggacacgtgcccttccacccatccagctcagtgccgccagccatcaacagtattgggagcaatgcaaacacaggtaagtggcgggggtgtcccagaaggccatgcctacttgaaaaaggttggactaggctcagtgagagctctctcgctctgtggcattagacaagtcacataagctgtaggcctcaactttatgaggcaatgcagaggctgtgaactggctttcccagagctgaatctgacctacagacatgtcttattgaacccatactttggtttggttttattttgttgtgttgggtttttaaataaatgtgagtggtacaaagaatcaagaatttttccctaaaaatgagatttccagcctttcttgagaagtcaaaagatctagcaactcaacaagatctgttttcctagtggcagcaataatatagagcttaatgttgagcatgccctttagaccctgcacaagtgccctagtctgcctctgctcccaccaacccccctttgggcatttctgatatatacctggcctctaagggcatcaggctatgacgcttgatggaggtgtgcataccatcatctgagatcccttccagttcagacaacattatggattttatgtatctggcctcactttacagctttgtttctgagaacactgtctgtataagacaaaactcatgctgcaaggtatttgtaatagtaggtagcatttttcagcattgactatgctaggtactcttttatagacacttttcaggtatgatctcagtccgcatcacaaccgtatcattagccctattcaacagatgaggacatcgggactcagaggtgaagtgatgtgttcaaagtcacacgtagaacaagtggtggaacagacccaaccagtctgatggcagagcctgcctctgaccactacactgtcctgccaactaagcaggtttgaaagagctctcttagtaaaagccctgcaggcgggagtgagcagaagttgttggtatcccagtgactttttgaaatgcacaggataagggagggtggattttccaagccatggtaaggcagcatgacctgacccagggtgagggagagggttcatgatgtaaacctcagagtagctagtcaccttcagcaggcactggtttaaagcaagacaagagagagtgacagtgaaatgtcacatgtgtcagtgggtgggggtaacctcgggtccctaatgccccgctgtctggtacctggtgctcatcagttattccttgagcctgtttttcccccagttagtgtggctattctggtccatctgcctccctcccagttgctggtgagaacctgggaagatagagggatagaagggcagtttcaggaaacttagcaacctgaggtgtcttggacctcattttccagtcatggagcatcacagttccaggatgggaggatgtattaataatgatcattctaggcaaaaaatattgagtgctagtccgggcatggtggctcacgcctgtaatcccagcactttgggaggccgaggcaggcagatcacctgaggtcaggagttcgagaccagcctgaccaacatggtgaaacctcatctctactaaaaatataaaaattagctgggtatggtggtgcatgcctataattccagttactcggggggctgaggcaggaaggtcgcttgaacccaggaggtggaggtggcagtgagccgagatcttgccattgcattccagccagggcaacagagcgagaccccatctcaaaaaaaaaaaaacaaaaacacacatcgagtgcttagtctttactaggagctattctaagaactttatacatataaactcaaggtttaaagccaggcattctgactatagacttcatactctgaactactatgctacactacctccaccaaaaagtacctctcctggagatgctcatccctcaccaaggggaggggtcacccaggcagggtgcctataaatttctttgtcttcataccttttgtgctccccatcatgggtaccccagcagccattaaaggatgaagattgaacaatgttgataggggtttggaccaaaagaggaaaaggaattgggcattccaagtagaaggcacagcatgaaataagcacggggtggataattagaggggacagtatacagacagatctggctggggtggattcgaatgagtaataacagtagcagagacttgtgcttaccgtgtgcctatccctctgctaaggacttcatgcagaaatggaggcagagaggtgaatgaagtgacttgcccaagatcacacagaggcgacagagtcagagtcaggatttgaactcaggcctgtctttaccctcagacctcagtgtgtgaaggctacattctggggggcgttgaaggacaggagaagcttttggattccaggcagttgcaggaaacaggaaatcattaaaatatttttgagtggggagcaaggattggcctttgagggcaggcagcttgggtttggggtgctgccaagaacagatcaggatttcttggagagtgcaaggccctggatctctggccggcattcttgtttttgtcattctcatgctgtggccagcctccaccccagtgcggagccaagcagggctcctcaggaactgcacgatcattccagtcagggtaatttcctgcctctcagcctctcctgcctacttcttggctgagaagggagaaagaaggaggccagagacaccaaaacaggcaaaaaggcctgtcttgaggattccccagtcccccagggcccagagtgtgccatgttccccaagagtgctgagtggggacagaagccagggctgagggagtctagaggctgaagaactcctgggaagaggaccctggacactctggggtagggcagaaactggtattaagggtgggccactgccttgccctgtcccttaggtgacttcctagccaggagcattagtattgtcacagctgagggaagatgctctggggcctgcaccaggctagccctccttcctgggctgggtgtcactgtagcactggcaggaaccccagcctttccatcagaaacaaggcttgggctctgtctcagcctgtcaactcccgtgggaactggggcaaagggcttcagctccctgggccttgatgtcctcacctacccagggtgaggctcgttggctttgtttcatttctttttgtctaggctgacttggggtacttctggatgccataggtggagctcagaggccctcttagcacccttttgtcctttatgaaacttcgttggaaggacttctgtgtgtcatgccctgtgcctgatcatgggattgcagaagtaattggactgggctgccattctccatggacccacagtccagtgcaagagggaggctagtgaggagggcagcaagcaagagggaggctagtgaggagggcagcaagcgccaggcctgaggcagcagcagaggggtacatgaccgaggcatgaagggagaagtggctgatggagaagagttggcgaggtgagcgaggcagaggaaaaagcacagataaaggtctgggagctcatgggaacctgccctgtcttgggagtggttaaaaatcaagttggaggccaggcatggtggctcacacctgtaatctcagcactttgggaggccaaggcaggcggatcacctgaggtcgggagttcaagaccagcctaagcaacatggagaaacccccgtctctactaaaaaaatacaaaattagccaggcgtggtggtgggtgcctgtaatgccagctactcaggaggctgaggcaggagaattgcttgaacccgggaggcagaggttgcagtgagccgagattgtgccactgcactccaggctaggccacaagagtgaaattccatctctaaaaaatatatatatatatgaccaggcacaggtggcttacgcctgtaatcccagcactttgggaggccaaggcaggtggatcacctgaggtcaggagtttgagaccagcctgaccaatatagtgaaaccctgtctctactaaaaatacgaaaaacattagctgggcatggtgttggccacccgtagtcccagctactcgggaggctgaggcaggagaatcgcttgaacccaggaggtggaggttgcagtgagccaagattgcaccaccgcactcggcgacagagcaaaactccatctcaaaaaaaaaaatcaagttggattcctttgccaacctcagacttgggatggacagagggtatggagcatccttcagaagaggacctgggatcaccctgagtcaccaggcctcatgagtggccagtttgggctcactgcagaaaaaaaatgggaggtagtgaggccccataacagggttgttgaggaagcagcttacgtacttcattcattacaagatataatgatgtttaagatgggacaggtttctgctgtcacaggtcttctattctagcagggggtgtagttaataagtaaacaggctgggcgcagtggctcacgcctgtaatcccagcactttaggaggctgaggtgggcggatcacgaggtcaggagattgagaccatcctggccaatgtggtgaaaccccgcctctactaaaatacaaaaaaattagctgagcatggtggcaggcatctgtagtcccagctactcgggaggctgaggcaggggaattgcttgaacccaggaggcagaggttgcagtgagcccagatcgtgccactgcactctggcctagtgacagagcaagactccatctcaaaaaagtaaataaatttttaaaaaaataaacaaataacttgataatttcaggttgtgatgggtgctgtaagaaagacaagacagtaatgtgatagagtgacggattggggcagcagaggtgggcagtgacttcagattaagggttcagggtaggcctcagaggaggcgacacttgagatgagacttgagggagccaaccgctgagatcaagaaggtaggaagaaagagcaagtccagaagtcctgaggctggaacaaccttgagtgtttcaggaacaaaggggagtttgggaggaggcaaaggctagagaggcatgaaccaagtggtgggttgtgggagaggaacaggggccaggtcctgcatggccttttaggcatgtggaagcatttgtattttgttcccactatgaaaggaagtcacagggatttgagcaggagtcaggctcggtcagatttgcatttttagaaggacctttatggctgttgtgaggggcgtggactgtaggaggcaagagtgaaggcaggaaaccaatgaggaggctgtggcagtaattcctgccaggggtgctggtggcttgagccagcggaactggagaaattcaggaaagtggctgacagcttgctgatgggttgggtgttggaggtaagagaatgaggtatatctggtaggcagttacccttggaccccaggtcccttcctcttggcaggttatggggccaaactgccatcctggcactgacggcagggggatggtctcctgtggttgggtccccaggtctaatattttgcttttctcccactctggccaggtctcccctgccaaatccaccctagcccactgaagcgctccatgtcactcatccctacaagcccccaggtccctggtgagtggccgagtccagaggagcttggggcccgggctgcttttaccacgcccgatcacgcacctctctcgccccagagcagcgtggcctcctctggcagtgagcagacagaggagcagggctccagccggaacaccttccaggaggatggcagtggcatgaaaggtacattggggacagcagcaccaggacccttttccaggggcttctgcagagcttagaggacagaaaggagcttgtagctgacacctgcttacccctctgaggaggggacatgtctgaggggagtagatagtccctgcttttagggctcaggactaagcagagagaccccacatctaccctaacaagttctagtctgactgggaaggagccccctgtcttcacacaccccagtctgacaaggaagccaggacacagctaagtgatggaacagaggttccagcaagagttttggagcaatcagtgaggtcatcctggtatacatccagcctagcagcttagaagggtcagatgtccttcccagggaaggctgcctgagggtctggctaggcagatgaagaaggagctgatggaaccttagctccccccaaccccctcccaattttttgcatcttttgaggcttcctgtgggtttatccccacaacttttcctttaccctggtaatctgggccaaactcctgacctttcactctccctcctttgccaaagatgtgccctcatggctcaagagcctccgtttgcacaagtatgcagccctcttctcacagatgagctacgaggagatgatgacactgactgagcagcacctggagtctcaggtgaagccaaggggaccatcagggaggtgctgggggcagcgctagtttggcatccttgcagcccaagcctcctctgtctccttgatctctatttgggtacccccaaatatctcagcctcacatctctagcttcctgtccccttctgcccttatcacagaacgtcaccaaaggtgcccgccacaagatagccctgagcatccagaagctgcgtgagagacagagcgtcctcaagtccctagagaaggtgaggacctggtttctgcatcttcaaggccagccagccacttggtggtaccagtagaccaaaggccctgagttggcctccagactcctcggatgtggcctccaaaattcccagccctagggacccagacttcagggaccacatgcaagccggcatcaaaaggctcacttgctggtggctaagagtctcccctccctgtctttcctggtttgtggttccaggatctctgtcttttgactctacaccttctctccccttttgcttttccatttcttactggtctttctggtagagcagagtgtctctgtctgtacaatctctctttccatttgattgtttctaaactcattttccttccacatctgattccgtttccttgccactgccttctgtttgtatttttccctgctcagtgtctaggtctgaatctctgattctatccttgttgggtccttgagactccaacattagactggcttttcgtgagttctgtgggacttcatcttaatgggaaagaggaaatgtgtacctatatgtttgtgggcttgcagtacccttacatgccttctctatgtgctggaacccagggtcctacccagccttctgcaagccctgtctgactctctgtgtagatactctctgtccctcattgtagggtctgcatgtgaccccagcctgtgtcctcccatccaggatgtgctggaaggcgggaacctacgaaacgctctgcaggagctgcagcagatcatcatcactcccatcaaggcctacagtgtcctccaggccaccgtggctgccgccaccaccacccctactgccaaggatggggccccgggggaaccaccgctgccaggtgctgagcctcccctagcccaccccggcacagacaaaggcaccgaggccaaggaccctccagctgtggagaactacccacctccaccagctccagctcccactgatggcagtgagcctgccccggctcccgtcgccgacggagacatccccagccagtttacacgggtgatgggcaaaggtgagaccagccacagcctagcaggaaatcctgaggcagaaagccaagtgaacccaagcaccagggatcaaatccaagttcgatggtgggagcagggctttgtaaagcctactggagactggaacactacagagagtagccaagacagggtgacaaggccccttgcccttgggcacgtctgggctgatggtggataacagcccttcccctcaaagcgtctccaggctgagcagaaatggggcagtgggtcagaagaaattccatgtagtaaagggtgagcagttgaggggagtccattgatttctctcagaggggaccaaagtccaggggatggggatggtgaaatttatcacagcttcagcctttcctaaagcagcatgatacagcagactttacacttggatccagatcagtctagatctggatctggacctgaggcaagtgactcaactctgagctttaggtttctaaggctaaaaatgtgtgtagtgacaagattgtgtcaggcactatgttgtatatcctcatgataacccaaataccatggctagcacttaatagttgatattcatccagcctgagtctcctgttccttcttgtgcacgagccagctggaggctggaacatggcagagggcatactaggggttaacctcctgccctttctcatgtccccccagtgtgcacccaactgctggtgtcccgaccagacgaggagaacatcaccagttacctccagctcatcgaaaagtgcctgactcatgaggtaaggccttccctagcatactcaaaaagggaaaggcggccaggcgtggtggttcacgcctgtagtcccagcacttcggccaccgaggcgggcggatcatgaggtcaggagatcgagaccatcctggctaacacagtgaaacccagtctttactaaaaatacaaaaaattagccgggcgtggtggcaggtgcctgcagtcccagctacgcgggaggctgaggcagaatggcgtgaacccggcaggtggagcttgtggtgagccaagatcgcgccactgcactccagcctggacgacagagtgagggaaagcctgccccatctttctcaagaccattgtgttgtatgtggcccatagggccttacctgacgtggcacatgccagcccttccagtcttgtatcttaccagtgttggctttagaggcttcttctcagaacccttgtacacactcttcctctctctctctcttttttttttttttaatagagacgaggtctcacactgttgccctggctggttttgaactgacctcaagtgatccttccacctcagcctcccaaagtgctgagattacaggcgtgacgattttcttttttagagatggagtattgctttattgcctaggctgatctcgaactcctggcctcaagcgatcccctgccctggcctcccaaagtactgggattataggcatgagcaaccatgcccagcccgtacatactcttttgtcagcaacagtaccctttcctcctcctcacccctcagctgtcagttcaaacatttatacctcagggacacctttaccaacccctcatttttatttaagtttcttttgcttcctgttcttctccctcagggagggataatttgtcacagttatcatcatgtatgtatctttccctcacaaccagactgtaagctctctgggcatggtcacctctgcatcccagaattgcctggcacaggcacagagtagatgagcaatgaatcttttttttggaaacagagtctcgctctgttgcccaggctggagtgcaatggcgcagtctcggctcactgcaacctccgcctcccaggttcaagtgattctcctgcctcagcctcccaagtatctgggattacagacacacactaccatgcctggataatttttgtacttttagtagaggtggggtttcaccatgttgtccaggctggtctccaactcctgacctcaagtgatccacccgcctcagcctcccaaagtgctgggattacagcttgagccaccacgcccggccaggcaataaatatttgaacaaatgaatggaagactggaagggaggtctgaaggaagcatcaccctctctgcttcaccggtgtcctgccaattctaggctttcacggagacgcagaagaaacggctgctatcctggaaacagcaagtgctgaagctcctccggacattcccgcgcaaagccgcactagagatgcagaactaccggcagcagaaagggtaggcgggtggccaggttacagggacctgccctccataggcctttgctggttagcagatcgtgcttagaggggtgattgtgttctgggctgagaatctagttttattcagtcactgggcgactttcccagaagaaaatttccactagaataggatgctgagctgaaaaacaacacatgtcccatgagcaggcccctcatatgtaccttgctcctcgcctgtatgcagagggcctggaagtccctccttagaccagacaaataacagaaatgtctcctttgagaattgaagattggagaactgttttgagtggacagtgaagaaacccttgtacatgtcccatctccttccagggggtacccttggggcagatgaggacagaatgtgtgatggaggtttatgttctctcctacaacttggggttgttggggaaggtgaggaaggggtggacagataggccccatctatgtaaattaacaccctgccttctgctctctcatagctgggcattcggctccaactcgctccccatagctggctctgtggggatgggagtggcccggcgtacccagcggcagttcccaatgcctccccgggccctcccacccggccggatgggcctcctgagcccctcgggcattgggggtgtctcccctcgacatgccctcaccagccccagccttggaggccagggccgacaggtaagctggctggaagcaggggcctggcctcctggggttggggtggcagtacctgggatgtctatttgcctgtatactctgtgtctggacccagcttagaggtggcgggggtgggagtgggagaaggcctgtaccacctccaccactcttgggtctgggcctcttctgcactcactactttctctcttcctgggacctgtgtagaacctgtggtttgccaaccctggaggcagcaacagcatgcccagtcagagccgcagctctgtgcagcgcacccactcgctcccggtccactcgtcaccccaggccattctcatgttccctccaggtgaggtgccccacccttgggactctgcctggccaacatcctcagctgacctttcttttttctcctgggtctcatgtccactgttcttctagactgcattggcacctctccccatacctcacaccactctgcacccatctcccccaattgtggggggttgttttcctcctctgcttcaattttatctctcaggtcttgcccccacccctctgagtcatcatctctcaccccttactcctaccccatctcatgtttcccaccctatgtcataatcttagtgtctgtgttgctctttgtcatcatctctttctttacaggatcattgaatactcaacttagaaggggttgaggggatgggacagttaaagtgtgagatttctgtggaggggagtcctgcccatcagcctactgggattctttcagatgccaggtgaccacacaggaaccagtggacttcacctcttagaacaggtgtttgaagtgagagggctgttttgacctctgcttacagaccatcctggagatgggagagcagaagttgggccaagtgcgggcacagtaactcacacctgtaatttcagcacttttgggaagctgaggcaagtagatcggtttgagaccagtctggacaacatggcgaaaccccatctgtacaaaaaaatacagaaattatctgggcatggtggcacacacccgtagtcccagctactcgggagggtgaggcaggaggatcgcttgagcccaggaggtcaaggctgtagtgagcagagattgtgccactgcactgcagccagggcgacagtgagaccccatctcaaaaagatgttgggacaagtgggcaaaaggaagattagagacttgctaaccgcaggtccctgccctgctcaacaagtgaggggttgactcctccacacggtgctggccactggggctgcagagacagataaggctcgtctggaatgggctgactctagagagagcatggatttgcagaattcatgtcataaactgccaagtcagtcaggagtcttacttgatgaggttgtgtagacagccatctgttgaggccgtgggaacccatccatcatgttcatcctagcacagggcttgacacacagtaggcatctgtaaatgatgttaaacaagcaggtggatgaaccgcaggaatgaacaagaaccattctctttaccagcatgctgtgtcccaggctttgtcagacagctctcctgcactgattgactcctcccaactgtatgtgtaaggacgctgatgttattcatcagtcagcaatctgagacaggtcttgcccaagttcaaaaaaaaaattcttttttttaaggagagacaattgggtgatctgatacgacatgagctcagggttcagagggaacagtgatgagagatgagggtggagatgggagctgggtcgtctaaatccaggtaaacagctcggactttgtcctgatggcagtgaggagtcagggaagggtttaagcagtgtagtgagggaggtcaggtctgcccagggaggtgggtggtttcccagatgcccgaataggaggcccttttgagaagtgtggtttgaggacaagtcccatggtggttgtcctactttgcccccacctgcctggcctgcctggattgaatcctgcccagaggagcaggtccaagtggggacaggaagggttttgatttagcttttgcaccaagtacagagcaggtcttcaatcagggagccttgggggctgcccagtgtccagggcagatgcccagactgtgctcaagacagtatgcagtctgtgtccagagtagtcacagcaggctgtgtgtggcctccaggagctccttcagtttcaattccactctctgcaagtcgggctttttctgtattgccaagcctctgccattgccattgtctcctctgcctgttgtgtgacacgctcgcctctctccctgtccacctcctcccgttcttccctctccccctccatctctcttgctcccttcccataccagcatcctttgtcatcccagctgtcttcacctgagtccagttggtccttaccacccccattctcctctctcccacccagactgcccggttcctgggcctgacctggagatcaatcccactctggagtctctgtgtctgagcatgacagaacacgccttgggtggtgagcatttcctctttccctgacccagctcccacctacccagcgtctctgcctctgaactgagcaactcagagtcatcctgaggggtccccaggggaggccagactccagggagggcctgactgggatgacaggctacctgagtgccttttcttgggcctccctccagctcctgatcttcctcccttcctccctttcttaccacagatgggacagacaaaacctccaccatctgacgggacccacagcccagcgcacccataggctccctgggcggcgggcgggggccaacccccaacgggcttctccgcgacagcgagagggtgggctggctcagctatatattctaatatttttctactctcttaccctcttaacttttgtttaacattggcacatgccttgctcactcccaggcccgtcgagggatctctgctgaggcccggggagttgggggcagccaggataaagggggcagggactggccagactgcctgcctctctcctttccttcctcatccccacctggtcccatcccacccctgcctcctccagaccgctgaccacctgcctctccccaagggagcagactccccagagacaaactgaccactaccttgtggagcctgctcagaaacatttgacatttggggtgacgcgcagggcagagaacctgccctccagaatgttattgagaggagctggggagaaggaaggggagcaaggagaggaagctctctctcctctccctgcttccccttcaccattccccacattctgcaaggacaggagccaccttcctctctctcacctcccctggccctgttcaccagaggttctctatgattaatttcttaggcctatttaagatacatatttatatagttcttaacggtttttctctgatcatttcctctcatttttagaatccccaggtctctctcagccaagacagtggcagggagagcctgaactttatgaggggagagggcagagccccctcctccagaccctcaagctctaacccattttcctccagccctggctacccggatgaagaggttggaggtgggcagccagggtagccagtgaggtcaggaagtctgttgccttaacgtccccttccccacgaacacacacccttctccgctcccaggtctggttggtgagacttgggagtcaggaataagggaaaggggattgtttggtttttgggtttttccctaagcccctcccttttctttcagcctttttccttcccccattatgtcatgacctcacttaagtggaacactatatcataacccagagattcgtcccagccccagagtccgacagactgtctggtccctattcctaatgaggggttgtgttggggcccaggtggagggaggggatttgggggttcagactgcggggaagccagggtctccctcttcaacgccctcctccccctcaacccaccttcccaactgggacattctcaagcttttcacaccgaaaaggaaaaaaaatgttatttttagatacattttatgaataacttttgttatgaatatggctggtaaccattgtgtatgttattaaagatacaaaatgttgggaaaaaaacaaaaaaaacaaaaaaaaaaaaaattttaaaaccaccaccctccctgcactatcaccccattccccagaccttcttgcccccgccctcctggtctgtggacttccctctgctctgagcccagggagggggaagaagccagggggtagggtggccctgggaacctggctctgggtccccacttcctctcccagtgccgggctgggtggggtgtcaggtttatttatgtacctcttgcacactcatcaacctatgcaagtcccccaccccggccctccatgtttctgtgcctttgctcatcccctcaatctcccagggcttctccagtccccctcccactagctgcaggaagtgggatggatgggccacctcgtttggaatcagcagggtgtccctctcatgggaccctcccctctccccagcctgtcctgtcttgttcactctccatcagggtgagctgactgtgcctggcactgggaggtggtgagggacaccgtctcacacacacagggaggcaagagctgccccccaccccacctgacagcagagtgtgcaggacgcaggcggccccactctgatgggcaggaccctgaccctctcccgctccagccccctccccaggccctcctccatgatttcaccctccctacccacttctgtccccggccccactggcagaatcagctttgagtaactgtacagtttttctcgctgttggagaagacttatttgttggagtttcacttgtttaatggtctgggcttattttggaaaaaaaaaaaacaaacaaaaaaaacgaattctgaccttcgttgtgctacattttgtgggaaaccattggccctgcctctggcctgtgtttctaagcctcaagccaagatccttgagcacctgggggttgcgggaggtatgtgctgggctgaatgacatcataggggctgggaggggaagtaaagagaagttgactttattaacagcaaaggtttgggggtggggaacaaacaagtgaaaggctcacaaacagaccactagaaaagtgctttgctgctcacaataatggtgtctgaaccagccctgaatgccctgggactcagtcactgtcactatcagcttcactggaatcagaagctgcagcttcactgccatcctcctgggccgagtgctcgctgccactggggaagggactggcgctgcggctgtggctccggctccgctggccacccccattgctgccgctgtctgaatcattgtcactgccaccttgggcctgtcctctgtcctcatcatcagagtcggcatcgtcctcagaatcagcatcactgccaaagatctcctctttgtcacgggcagcccgggcctcatcctcgctgctctcgtcctcaccactgccactcttgtcactggcctcgtccctgtcaccttcctcccgttcactctcgctgcccgagtgctcatcttcactgccctccttctcactgctgctgcccttctcctgctcctcatctggaagggagtggagagagatgaaacccacttttccaccctcccagggctcccagagtctggcctgtccagatttacctgagcccccagcttctttctcttctgtctccatctcctcttcctcttcctcctccggttcgtggttttctagctgggccttccgtgcctcctggaagcagcaagattggaatgaggggaaggagggtgttctgctgggtttttgtccccctcctcacctacaaccaccaccctccctgccatgggtgccctgagccagtggtgcttgttacctgagcttccagttccttctcattcatgtcccgatgtttgaccacaagcagggcgttggtgcctgactgaaccccagccttggcccggcgcttactaaggcggaccctgcagggggtgaatttgggagagagaagtggaagatgcagttaaagacacacctcccacttccccgccccccagtgaggggtctggtctgacttggttccccatcaatacttagagtaaatgggaataaatacagattgaataagggcagctaagctcaaggtattgagggcaggggaaaggaaggatggctcccatggcaccagtttggttgccctacactgtgtgtgtgtgttatacggtgtatttacataaatacgggcatgggccatttaacagggacacattctgagatatacatcatgtgaacatcatacagtactcttacacaaacgtacatagtatagcctactacatacctaggctgtaatggtgtagcctattgctcctaggctacaaggttgtacagcatgtgactgtactgaatactgcaggcaattgtaatacaatagtaagtatttgtgtatctaaacatagaaaaggtatagtaaagatacggtattctatcttaagggaccaccataagcagtccattgttgactgaaacatgcagtgcattactgtatgtgtcagttagttaccaacactttgagaaaccaggagatgtcaaatcatttggatttggggcttttggaagataggaatttctggccccacagcacagcaacagtgggctggaagtgaatagtgccctccatggttgcccagaactccaggtcactcagatgctaccagccactgctcttttacatttcctgcctggcctatggggtcacagttcttgtaatctctgctttaaacagaaactcaagacttcccaactctacaccagaggtgctggcatagcagtaaactttgagccataagggaagagttttggagtcacatttttgaacatgggtttaagcatttcatttaaaacattcatgctaattttatatattactccatactttggcaatgtttactttcacatgaagtctgttactaatactgggaaacttggccctctgccttgcgcaaaggctctaaatgtctcctgcattaagatattctggctgggcgtggtggctcacacctgtaatcccagcactttgggaggccgaggcaggcagatcacctgaggtcaggagttcaagaccagcctggccagcatggtgaaaccccatctctattaaaaatacaaaaaaaattagctggccatgctggcacacgcctgtgatgccagctactcaggaggctgaggcaggagaatcacttgaacccaggaagcggaggttgcagtgggctgagatcacaccactgcactctggcctgggcaacagagcgagactccatctcaaaaaaaaagattttttttctggctcctcctgttagaaccaagtccagctcatgtgcatgaccagacatctgctgctcttgtttaccaatgcatatgacaaattcttaggtacaaatgacctccaaggtggctcttgcatgccccagggtcttaagaagcacagatccaggctaatcagataggagtgtgctgagtacctggtttccaactcattgtagtaaaccccgtcaccctctcggaagatgaagaagtagttttcctcatagcccttgctagctttgttcttcacgttccagttgtactcccgagcaattttgtagtcatacctgaagatgagggcacaggttcagccccatttcttccctatcccaatccccaaaacttcccaatccccaaaacttaaccgcaacccacgcacacatcatctggtgcatagtccatctcctcctcctggtcccgctttcgtttcttcaacgtctcttctacaggcaggaaataggccacaaactggttcccttcctcatccatcatgcccctggttgggggaaaaggagtagcaatgaagtgtgaggacaagaggcagcaaggagcaggccaaggtggacagcaggaccacctacctaatcatggcctgagacatcatctccaacgcagctgcaccactcgtgtccttgggggctgggtctgagtcaaagatcacctgagcacatggattgatccacatctagggagatggaggcactggggttagatgggaacaggcacaaataggctgtccctttctacctcccaccttgggcctgaccttaaagtctgggaagacaggcatgacctccaccggtgtgactcggggtttgctgtaatgctgtgagatctggtggaacaaaaacaaggtgaggaggagctctgcagccgcacccttgcctctccccatcccagtccctcaattactgatttctgggcatcctcaaaagtcttctcaatggctgtgatctggctatccctgtctttgtatatttcttcctcggtaaactgctgcttcacagaaaccccaatcctaggaatgaagaaaaaggtccttaggggccactggacacacctaatatctccaccttccctctcttcctgttagtaacttacttgacctcaggcttctcattggagatgccataacggttgaactcagtggagatgtactctgtctttcgcatccatggcaccaccttcgcgtgctgctgggatctggggtgggaaatcaggtatctcaggaccccactgccctcctgcttgtagggcccacctgagccagtctccagtacccatttgctacccactcacctcttggagctggtgggggcctgaatctcctcttccaaaagtttctcatcagctggatctagaagaactagaggagagcggggggcaggaggaccatgagggaggcccaggcctgagcctttgctgacctagagcagaccctccctgtctccccacacaccattggggtcgatgcggtaggtgtcaggattgatgagatcgatggtgacccccaggtctggctcagtcaggaggtcatgtttgtgctgtttctccaaggaagtggctttgtactggacgaacctgggtggggaaacacctattgtggtgtttggattccagcttcacccctcacagccctgcttcccagaggcggagcttctctggggaggaactcagaatgaagtgtcccccatggcagagtctgaaagctggctccccagtgggaagggacttggacactgcttgctccattaacaattgagcagctactactatgtgctagggtaggtactgtgctaggccctgagcagacagcagccaacgagacaagcagtccctgccttcaaggaactcatacctgagtagttttcccattccttagtctcacctgttctggtcgaaggggtaggtgatgaacttggggtcgaaggggatatcagggaggctattgcagtacttgactcggcagaccactccagacctaggaacattagtggctcaaaagtgggcccccgctgccccacctctgctcccagccccactgccccaccgctcctgggaaagcacagtggggctcacctctcaggcagagtccggtgggaattgggcctagtggagaagaaagaaacagtgataggtggagaggacgggattgacaggagaatgaaaaaggcttccccaacctttcaaaaggtaggaggggtgacaaatgctggtttctttgggtggtggtgtggggagtgtccaaatgctttaatggaaggagacaaatgttcaatttatttaggaagaaatgcccccaaaagctttaatgaacaaggccaagtgctcaatcccttttgcaggagatggcttcaagtgctttaataaagaaccatgtactcaatcgtcttcggaagaggggtctccaaacggttgactggagggatcccttctggagggagtctccaaaagcctaatccctgaactgcacggcggggaggaggggaacacctgaatctcagaaggaacccgcccccttcgtcaaaggtgagcgcttcatgacgtcacgggcagacctgggggctggtgacgttgttcagcagaaaccctctcccgatcccccgccttgctgcaacagaaaagcgtggcgcctacctgtggccatcctcccgctgggcctgggtctggatggtgggcgccatagcgacgaggcgacggcagcccggacggggtcctagcgggaccgaagggggacgcagaggggcgtgccgacttcaggggacgcctgatccgaggaaggcccagcttggcgccgctccccgcggaaagtgggttgagatgaggtgggcgggcgagaagagctccagcgagactcaggtgaacgcgcaggcagcaccggggacggactcgaagctccggttccaccaactgccgccaagacgctgaggacccaacgggtctcctcaggccgcgacgccttcggggaaatgaagtccggctcggaaccacacacggattggcgagcgtctgggtgaagggcggagcgagggagagaggtgcttctgtgattggtggagagatatctcagtctggacgcagatttgagagtgacgtaacgttggggcacctccttcccctccattggcttaattgcctagggggcgggactaactagcaaacggggactagaaatagggatgctgaaaagcaacggggagagacgcagtcgtaacgcacttccggcggtctacgcgaggaagatggctgcatcccagcagcaagcttcagcggcttcctcagctgctggtgtatcgggtcctagttcggctggcggcccgggtccccagcagcagccgcaaccgccagcacaactggtgggccctgcccagagcggcctcctgcagcaacagcaacaggacttcgatcctgtgcagcgttataagatgctcatcccgcagctgaaggagagtctacaggtgattggccttaagcagcgagaagcaaactggatttggtagtctagaggggcaggccgagggccaggttagtcggagagagcgctaagcagaaagaggaatagaacctgctgttttggcctggctggtgcacgcctgtgttcccagcactttgggaggccgaggcgggcggatcacttgaggtcaggagttcaagaccagcctggtgaaacctcgtctctactaaaaatacaaaaattagccgggcatggtggcgcgcgcctgtaattacagctactcgggaagctgaggcaggagaatcgcttgaacccaggaggcggaggttgcagtgagccgacatcgtgccattgcactccagcctgggcaacagagcgagactccgtcaaaaaaataaataaataaataaataaaactgttgttttctgcgagacctaagcgaagctcggcagagatgggatcagcgctgatgctgaggctgggactggccggagcttgagtgaggggttgtttaaaggagaaactgggctctggtcgttaaagcctgaggagagtactggcttatacggagattctgcccttgattgataggtgagggaggacccttaggttattggcgagaagctcaggtgagagcgggcctctgggaggatggagtggtgacagctataggaatggaaacgaatattactttggaaagtcaggagggaaggtgccagttgaaaagaaaacctgagactgagtgatctcaagaaagagtgtagatctgccagaggtattcccttttgtttttccatttcccacgtgttttgtttttgttttgactagaccttgatgaaggttgcggcccaaaacttgattcagaacactaacatcgacaatggacagtgagtgcagccccctttaccaggatattctattgccttcccagtctttgaaattcatctttccttctcctgctccccgcccacctcaccttctatatttacttttttttttttttttttttgagacagggtctccctctgtcacccaggctggactacagtggcacgatcttggctcattgcagccttgaacacctgagttaggagatcctcttgcctcagcctcccaagtagccaggactacagacatggctacagactacagatgcctggctaatttgtaagatttttttatagagacggagtcttgctatgtttcccaggctggtctcaaactcctggcctctagccatcccctcagcctcacgaatcacttctcctattttattttatttttgttgttgttttgtagagacagggtcttgccacgttgtccaggctggtctcaaactcctgggttcaaacagtccttccaccttggcctcccaaagtgctgggatgacaggcatgaaccatcatgcccagccttttccttttctttctttctttctttcttttcttttttttttttttttttttttttttttttttgagacagagtcttgctctgtcgcccaggctggagtgcagtggtgtagtctcagctcactgcaacctctgcctcccgggttcaaatgattctcctgcctcggcctcccaagtagctgggactacaggcgcgtgccagcacatctggctaatttttgtatttttagtagagatggggtttcaccatgttgtccaggctggtcttgaactcctgacctcaggtgatctgctcgcctcggactcccaaagtgctgggattacaggcgtgagccaccgtgcccagcctccttttctttttttttgaacccctccggttttcaaccactacttcagatctcctggacctgtacctggtttcctgatggacacttggttgggtagatactggtgtcccaaagattagaaatcaattcttcagacatccttttttccttgtctgtagaaagagcagtgatggacccatacagcgctttgacaagtgcctggaagagttctatgcactctgtgaccagctggagctgtgcctggtaagaagccttctggacacggggtaacaacagccgtgtcccagtctctggggtcttcagaaacagtcagtcagtcaactcacactcaactggggacctcctgtgggccagacctgtgcttccaccaacactgaggacacagggttgctctgatccttgcccttgcagagctttcagttgagtggaataataagcacacccctaaacagtgacagctcagagtggtcagtgctgtgatgggagaagcctaggccagagtggttagggttatgattgaggaggcacaggcagagggatcagggctgggatggggaaatctcagtgtggaagcccagggtggggatagggagagagtggcttagggaaggctactgctagacagcacatctgaccaagtctgaaacaaagaagagaagaggggcaggagttgagaggagggtaagtgactaagaatacagcctctggagtcagatgcaccatcaatctctacctctgacctctgggttcctccttaggaaaacggagtttccaggaaaacttagattatgcgtgtaaactgcttaacatgataccaggcatatggcaaatgtgtactgtagtatcatcattattttggactggtttttttggtgggggggtgtgggggaggacagtctcaccatcacccaggctggagtgcagtggcacgatctaggctcactgcaatctcctcctcccagtttcaagcgattctggtgcctcagcctcccaagtaactgggactataggcataccacgcctggctaatttttgtatttttagtagagatggggtttcaccattttggccaggctggtcttgaactcctggcctcaagtgatccacccgcctcagtctcctaaagtgctaggattacaagcatgagccactgcacccggccttttttttttttttttttttttttttgagacagagtctcactctgtcgccaggctagagtacagtggcgcgacttcagctcactgcaaccttggcctcccaggttcaagcgattctcttgcctcagcctcctgagtagctgggactacaggcacgcaccaccacgcccagcaaatttttgtatttttagtagagatggggtttcaccatgttggccaggatggtcttgatctcttgaccttgtgatccacccacctcaccctcccaaagtgctgggattacaggcgtgagctaccacacccggctttttttttttttcctccaagtcagagtctcactgtgtcgcccgggctggactgcagtggcacagtctcggctcactgcagcctctacttcctgggctgaagtgatcctcccacctcaaagtagctgggactacaggcatgcactgccatgcctggctaatttttgtattttttgtagagacggggttttgccatgttgctcaggccagtcttgaactcctggggtcaagcaattcacccacctcagcctcccaagcgctgggattacagaccgctgtgccgggcctggcctgggttttgaaggaaaagtgggaggttgagaagcttggtagtgtcagaaccatgttccaaacagagggaataacatttgctttaaatttgttttaggaacatcaagtaattcattctggctgaggtgtggtaggcatagggcttgttggattttgaatataatcctaagggcactggggaagcatggagggtttcaagcagggaagaatatggacctatctgctttttaggaatatacctctggctgacaaatgaggggaggttgaaccctggaggcaggagcccaagggcgcagccatggcaggatccaaggacgcctggactgggctccaccagggcggggtcgtgaggaaatggggaagactgggggaacttgagaggcttcgtgtgcagggctttgtatatgggccacaggaccggtgtgctggaaggagataaagtttctaggatgaggcccaggactctggtttataatggaggactgtcactgggcccggtgattcatgcctgtaatcccagcactttgggaggccgaggcaggcggatcacaaggtcaggagatcgagaccatcctggctaacacgatgaaaccccgtctctactaaaaatacaaaaattagccgggcgtggtggcaggcgcctgcagtcccagctactagggaggctgaggcaggagaatggcatgaacccgggaggcagagcttgcagtgagccgagatcgcaccactgcactccagcctgggtgacagagcgagactccgtctcaaaaaaaaaaaaggaggactgtccccgaaacagggacctaggagaagcagttttggggagtacaagggccctacaaatgtcagggggaggccagcgacagtgtgggcgccattagtgcagaggtggaaactgagtggtgtgcgtgggtgtgacagccctgggagggcttgaacagtgagagaagacagggcctaggaatggctgcacttacgtcttaggtagtgtaagaagtacctagagctggtcaggcgcggtggcttgtgcctgtaactccagcattttgggagcctgaggcgggcagatcacaaggtcaggagttcaagaccagcctggccaacatggcaaaaccctgtctctactaaaaatacaaaaattagccaggcatggtggcgtgcacctgaaatcccagctacttggatgagacaagagaatctcttgaacccgggaggtggaggttgcagtgaaccaagatggcgccactgcactccagcctgggtaacagagcgagactgtctccaaaaaaaaaggggccgggcacaagtggctcatgcctgtaatcccaacactttgggatgccaaggcgggtagatcacgaggttaggagttcgagaccagcctggccaatatggtgaaatcccgtctctactaaaaatacaaaaattagccaggcttggtggcatgcacctgaagtgccagctcctctggaggctgaggcagaagaatcacttgaacccaggaggcagaggttgcagtgagccaagatcgtgctactgcactccagcctgggcaacagagcgagattccacctcaaaagaaaaaaaaaaaagcctgggcgcggtggctcatgcctgtaattccagcactttgggaggctgaggcgggtcggtcacctgaggtcatgagtttgagaccagcatggccaatgtggtgaaaccttgtctctactaaaaataaaaaaaaaattagccgggtgtggtggcgggtgcctgtaatcccagctactcgggaggctgaggcaggagaatcacttgaacctgggaggcggaggttgcagtgagctgagatcgtgccattgcactccagcctgggcaacaaaaccgaaactccatctcaaaaaaaaaaaagaaagtagtacctagagcagccagagaagcaggcagaaaaccaggggtgagatgccactgccaacaccaggcctggagccagggcagtaacaatgatagtagctaacagttcttggcactttaaacagtgtgccaggacccgtgcctgtgtctcatacacctgctctcactgttctcaccttatgaggtaggaagaggtggttattaaacccgttttccaaaggaggaaactgaggctcagagaagagtagccgccatgcccccaggttccccagcaaatgactggcagggccaacctctgactctaagacctgggaaatccagaggccaagccgacaacccccagctggcccttggggtggggtagaatgacctcgggtggagctgatgctgtccccttgcctgcctgtccacagcgcctggcgcatgagtgcctgtcacagagttgtgacagtgccaagcactctccaacgttggtgcccacagccaccaagcccgacgcagtgcagcctgacagcctcccctacccacagtacctggcggtcatcaaagcccagatttcctgtgccaaggacattcacaccgccctgctggactgtgccaacaaggtcacgggcaagacacccgcaccacctgctggccctgggggcactctgtgaagtgggggacagggagtggggcaggcagtggttggtgggtggtgtgcaaagggaatgaagagcgtcctgggcctaaacacagcagcctcctctcttcctgcctgagcaccgcagcgggagccagcagggggcagcagaggccaacagggagctcgcaggccgggcccctgcgtccctgccccttcttcctgctccccctcctagcctagggtagactttgaactgtgtgtgttgatgacttctctgttccacaggccctcccccattcttgcctgggtgtggagccctggctgtcccctctccctcagtccttcctgactgtctccagctgggaggtggtctctgtgtgccactcctctgtgtctctattacagttgtgtctctctcatcctgtctctttttcccttgtttctctgttcctgttaatgtgtttctccccatggtcctatttctctcactctgacctctctctcttagtcccctttagctgtcttctatccccagctcctaactgggactctgtgtctatgcagggggccagcacccctgggttatctggggctaagggaagggacttcatttccaggggccacagccaagcccagagtcccccagcggctcgcatgtcagcccagaccccagggtccttggcctaggagaggagcagtggaggggcccaggctctgagctccacaggtctgagcagggagcaactcaggcccccacccaagcctgcgtcagcggaacttgagtgaggggcgttgtgcaatttgtggcaaggctggcccagctggatgcctgggtcccagtatttttagccccaaaggagaagtgaaaaggccccagccggggtgaatcatcagtcctggggaagaacccaggcgcctgagccccagctccgggaagcaggcactggggagggggcttcaaggagggagtgccccctcagactccctgcttccctggaagcttcaggaagctcagcctcagccttcaggcctgagcaagtgcagggcggagctaccagcccaggctcagatgttggggtgtgaaagcctcaagtgactcagcctggttggagaactgccccacccagtatcttctgtgccatggttcccacattcgcactccatggcctcctgtcctggaccccacgtctgcaaggaaaccctaggaccatggatacctctgtgattcacgctgagcccaagtccccacactggaaaactgggaaatggccagctgtgtgtcccaggaaattcctccccttattcttccttgaagtgcccgagcatgtagggcaagaaggaaggctgaagcgctgtccctaggaggaatttctccttcaggggagcctcagttttgcccatttatctaattgaatcagttttttacccaatcccccgattttgtaggataatctcccttatctaaagtcaactgattatggactttaatcacatctacaaaacacttccatggcgacagctagatgagtgtttgaataactgggactgtagcccgtccaagttgacacataaaactgaccatcgggccgggggcggtggctcacgcctgtaatcccaacactttgggagcccgaggcgggcggatcacaaggtcaggagttcgagaccagcctggccaacacggtgaaaccccgactctactaaaaatacaaaaaattagccgggtgtggtggcacacacctgtagtcccagctactcgggaggctgaggcaggagaatcgtttgaacctgggaggcagaggttgcagtgagccaagatcacactattgcactccagcctgggcgacagggcaagactctgtctcaaaaaaaataaaaaactgaccatctagtccttgtcatctgggcaccctcacacatctccttaaccacacttaatctccaaataagtacgataacatagtcatagtcccacccaacatgatgcagttatcttgcatacaactgaagacaactaaccctttccccaacagagcccaccagcagtggtggagatgtcggtccatgagcgcacacacaagactgagggactgtcggccctcccaggtggtgtcaacacaacatcacacacaggtgggggggcctgatagcccagcacccatgatacagggcctaccaatgcttaaaaccacacccagggagcccacagaggcactcagtgggtggtggggtgatggatacacatctatcaggcacagggcggaggtgggcaccactgagttgcactcagcaaacacattgggtatcttgtgcccaaggcctgtatttgtggagctgatgttctagtgagagacagtaaatgtgacaaaagtaaaatatatcagatggtgagaaaacagaaaaatgagatcagaagtggagatgttggggccaggcacagtggcccaggcctgtaatcccatcactttgggaggtgcaggcaggcagatggcttgagcccaggaattcaagaccagtccgagcaacatagcaaaagcccttatctgcaaaaaattcaaaaattagccaggtgtggtggtgcgtgcccaggttcccaggtactcggaggctgagaggtgggaggatgccttgagcttgagaggttgaagctgcagtgagctgtgatcgcaccactgcactccagcttggttcatggagaccctgtttttttaaaaaaagaagtggaggtgtttacaccagcaaaatactcattttttaagtgtaattaagttgaagatcaaaaaatggaaatgtataattaaatcatacttagcaaatctaacacatgaaatgtaacatctgcatatggagaatcgtgttactttattgaaaaacattaaaagtttgagaacttaagttggattgtggtttcgtgagcattcattatggtttatatatgttccatgtatttattattaaatagatgacaagggttttcttattcttgtttatatatgtttgagaccagtctcactctgtcgcccaggctggagtgcagtgacgccatctcggctcactgcaacctccgcctcctgggttcacgtgattctgctgcctcagcctcccaactagctgggattacaggcgtgcatcaccacacctggctaatttttgtatttttagtagagacggggtttcaccatgttggccaggctggtcttgagcttctgacctcaagtgatctgcccgcctcggtctcccaaagtgctgggattacaggcacaggcacgagccactgcagtgggccttttaatttttgttttaatccttgacagaggtcaaggaaggcctcactgagaaggcgatattagagcagccccgaaggagagggaatgagcttggggacatccacacatccaggcaagagtgctccagacagagggaactgcaagtgccagggacctgggacaggaatgtgctgggatttatggaacacataaaaaggaggcttgggcacaatgagggagcagggataggagaggaaatccagacaggtcacagagggccttggtgaggacttgggtttgctaggtaactaaacccagagggagactacacagtctggtgcacactgcatgctccagggacggggtgtacgtgaggtgcacagccaccacaaaacagaccgtggggactccagcacacagcatgtctgccccactgcagagctaacccaccatcctacaatcatggtgcccccagggaccccatcccattgacagtcccacaaacatactttcagggagcaacccagccacatgaatacacaaacaaccctctaaccaccactttaccagataagctatctctcaccccatcgcagactttgcccatcacaggctgactcagccctgtccttagcccagcactatcagaagcagcctcatcggcgctgccccagcttctcaggtactcatgtctgcacgtctgctctgcccacagaggccgacacaagaacagtgacatggaggggggagctcgccagctactctccccatcacgcaggctgtagacgtcagaaaccaaagttcatcggtttctctgccttgtgactcgggccacaggaactgcattcagacgccggcctgctgtggtctgcacatgcagtctcagacacccacgacaaaggacgtggacatatgtgaacacttcacacacccagggactacacacactgagccacaaaggccttgcacacggccacagctgcagagtcacagatgctgacacagcttcaaatgtgtgtgccgggtgtggtggcacgtgcctttagtcccaactacctgggaggctgaagtggaaggatcgattcagcctgggaggtcgaggctgcactccagcctgggcaacagagcgagaccctgtctcaaagcaacacacacacacaaagttgtgtgtgcacacagcctcagtcacaggggagggcagtcattccctcacccaggcacctgcgcggagttacacacacttagtcactgcagatcccacagtggctcagagctacgcacagatatgcaggtggggatgaaaatctcatgttcttaagaatgccgcctcagagacaaattgcagtacagttacaacagagcatccaccccacacccagagatggccaaagtacacacggtacagtcgatcacacaggcggtttcacacattgattcacacagccaagtcatgcgggattgtatgcacacagccttctcacaggaaactgggcacactcgtgtccctcacgttcccccactgcatacccaggcacacaggctctcgcagccccagatgccaaggcgcacacctttgcacccgcaagcacacatactgttcacacaaccgggtacacatgacggctagcccaggcccgccgcccacgcagtcgcaggccagggtacacacggccagcgccgcccttggccacgcccgctcaggcccaggcaatcgcgccaggcgcacacacggcgcgagcacacgtgccgcgggtacacgatccccagctcgcccgcgcactcggccagctctcacacccccgcgtttcccgtccccgcttgtttttctggaaactctgctctcccctcccctccccctaggccggaagtgttggctgtatttttagcctctctggtttccgcccctttccttctttccccgcccgcccaggactggccccagcgccccgcggggggaccccggccatccccttccccaccgtcattccagaggggattcccggccgccgctggggccgcggattttcccgctggctacgtagggagcagggaggagtcctgccatgaacttccttctggcctgggacgcccgagatctgaggggagggctgagggcctggtctcctggatctgatcgaggacaggctgggggtctcccgggtctgagggaggaggagttaggggcctgaaccgctggatctgagggaggaggagatgggggcctggacccctgggtctgagggaggaggggctggggtctcgggggacctgaggatctgagggaggaggggctggaggcctggacccctgggtctgagggagggggggttgggagtctcccgggtctgaaggaggaggagttaggggcctggacccctggatctgagggaggaggagctgggggcctggacccctggttccgagggaggaggggctgggggcctggacccctggatccgagggaggggggtgctgggggcctggagtcctgggtctgagggaggaggggctggggacccagggccctgggttactgcgagggaggagggactgaggccttggctcctgggtcccccaggtctgtgggtttggggaggtggaggaccagtccttctgcgagcaaagcatccccctcctttgagagtggccctatcccaaaagtcctgactcttggggccgatgactcagcagatgggagagaggagggggacagcctgactcagggatgggaaatgctcccggtctccagggagtagaaactggaatccctcctccaggattgatcgcagcccgagctgagccgggctccgcgaacccaaggatgcccccaacccccctttccccgcctcaatcctttaagctgcgtaaggatttggagatcggcctagaggcgggtcccaggtccccctcctcccccctttttccccgttgtcctcaaggctctgtttacaggagacgggagccctggttacaggagaggaacccgagtgtccgggctgaacctcctcgtcacggcttccaggaagcccccactcccccgccccttgcgagtgagtcacgggcgagcaggaggccacaaccgtgccagagccgcccgcggcccgcccagctcacgagaccggcccgggaaggcccctcagcaagcgccgcaccagggattcccccccgccgctctcggacgaagcaggtcgacgtggagcctggcagaatctccccaccttaatacaagcccgcagcctgcaagaatgaactttccaccattataactgcgcactgtggcaatgatttctacccccacattttcactcagggcatccagctctccagcaccccttagaaaatagtcttcctagatcttaagagggttttcacttagggcgaccctttgataacaaaagatgtgccagtgtggggaatgatccttgaaaatgtagtctgggcggggtgcggtggctcacacctgtaatcccagcactttaagaggccgaggcaggtggatcacctgaggtcaggagttcgtgaccagcctgactaacatggtgaaacccccgtctctactaaaaatacaaaaattagctgggcgtggtggccggcgcctgtaatcccagctactcgggaggctgaggcaggagaatcacgtgaacccgggaggcagaggctgcagtgagctgagaccgcgccattgcactccagcctgggcaacaaaaacgaaactccatctcaaaaaagaaaaaaaaaaggaggcccggccggcttggtggctcacacctgtaatcccaccactttgggaggccgaggcgggttgatcacggaggtcaggagatcgagaccaccctggctaacacggtgaaaccccgtctctactaaaaatacaaaaaattagccaggcgtggtggtgggtgcctgtagtcccagctgctcgggaggctgaggcaggagaatgcgtgaacccgggaggtggagcttgcagtgagccgacatcgcgccattgcactccagcctgggtgaaagagcgcgactccgtctcaaaaaaaaaaaaggaaaatgtagtctgaaggcacaccccactataagagacccatccagccatcaactgaggatgacctttttttttttttttgaaagcttttttcaatcaatgcaaccatcagttatagtgaaagacctccaccttgccaatcttgagttttctcagagggcaaacctcgacataatttcagaccctagtatgaggcctgtgccatttgctagctcgaactaggagagtaactttatttttccccctgagagggagtctcgctctgtggcccaggctggagtgcagtcgcctgatctcggctcattgcaacctctgcctcctgggttcaagcgactctcccaccccagcctgctccctccccgcccccgagtagcgggaccacagggtgtgcgccaccacactcagctaatttttgcatttttgtagaaatggggattcgccgtgttgcccaggctagtctcagactccgagctctagtgatccgcctgccttgggcgcccaaagtgctaggactacaggtgtgagccgggcaggagagtaacttcactttggtttcctcctgccttaaatgggcataccacctggcattaggattaatgtgcgtaaagtacttagaactcagcccaggtgagttctccttaactcagcctagaagagatcatccgcccgagggtgagggggctagagccgccctgtgaattgggaaaggaggccccttttcagccttgccaggtatcctggaccccacccaacccactcactcacccacccaaccccagcaagtggggagagggagagcagtccaggtctccttatctgtctgggctgtttaggagtgagaccacacaaggcaggcagttctcagagaattcccctccaaggcctgctggctctttcttggcactttgctctgcagatttctttccgtaagtgcttatttctcacagtctttctcctttttgtccagtttctttttctttttaatttttttaaatagtattttttgtagacatgggatctcactgttgcccaggctgatcttgaactcctgatctcaggtaatccacctgcctcatcctctgaaagtactgggattggccgggcttggtggctcacacctgtaattccagctctttgggaggcggaggtgggaggatcgcttgagccccggagctggagattagcctgggcaacatagggaaaccccgtctttcaaaaaaaaaaaaaaagaagaagaaaaaggaaagaaaaacacaaaaagtgctgggatcacaggtgtgagccactgcgctcagcccctttctgtttctttttgtgatcctcccaaccctcttctccctctgaatctgtctctgggactgtctctgtctccccgtcttccctcccttcctcaccctgtctatctctctctgtatgtctcttggtgtgtgtgtctctctcgatgtttttctctctgcctgtctgcctgtctgtacccctctgcgtctctccccgcccccatccgtctgtgtcgcacgcgcacccccatcgggcttctgctcttgtcaattgcccctggggccctgcccccacctccgccccagtttccttctacaagcctcagtctccagctttgaaaactgggcaggcgtccccccatccgcacccccaccccttccccacgcattccccgctcggtcacggctgtccaccggccaagctcaggcgcgtcctggcccagggccgggcggaagggaaccagtccagggccagccaggctgcgccgggggcgcgcgtccgggaagcgcccctcctgccccgcccccggccccggccccggccccgccccgtgcttgcagtttcctataagtagccggctctcggtgccagcctcagcctgacttcagcgctcccactctcggccgacacccctcatggccaaccgttacaccatggatctgactgccatctacgaggtgagtccccgccgcacggcatccccggtacctgcatgcctgagtccgagtccccacctctctagcgccgcaaactccagcccgggacgcttgcctcccttctccaactggggctccctagcgccgcgccctccagcctggggcccctgcctcccgctcagaccagcttggtgatttggaggtgaaaatggaacccgcgacacccggctcttcgctcaaacatgggtggggcggcccatgcaagtggaaagtcggagaacttttctcagaccgaggctgcctggaggcggaagtggcccccatacctggctcacccctagtcgttgctgagggcgtggttttgcgcggaggcgtctctggggctgaagtctcagggtggggggatccgacttctgtctctccagtccctgaccgtagagacagagaaccctaaaaccgaagcaatccggacttccaggtcaactttgcccggtttctccagttgtgaaactggagatcccgacgcgtgggtcatatccggggaggacaagagacccaaaattgggaaacagtggtgcgccctgacttcggggtccccctcttggtccagccggggaagccgggattcctgggtccctcgggataaggcctcggtggtgggtaaactcagaacctccaactctgggttcctggcatccggaacccaggggtttctgcgggcgggtggggctcaggcggggagcccacaaaccggcctggcaagctctagttccctgcagctggggtggggcgtcgccctgcattttcaggtgccttaaccgacccatttccgcagagcctcctgtcgctgagccctgacgtgcccgtgccatccgaccatggagggactgagtccagcccaggctggggctcctcgggaccctggagcctgagcccctccgactccagcccgtctggggtcacctcccgcctgcctggccgctccaccagcctagtggagggccgcagctgtggctgggtgcccccaccccctggcttcgcaccgctggctccccgcctgggccctgagctgtcaccctcacccacttcgcccactgcaacctccaccaccccctcgcgctacaagactgagctatgtcggaccttctcagagagtgggcgctgccgctacggggccaagtgccagtttgcccatggcctgggcgagctgcgccaggccaatcgccaccccaaatacaagacggaactctgtcacaagttctacctccagggccgctgcccctacggctctcgctgccacttcatccacaaccctagcgaagacctggcggccccgggccaccctcctgtgcttcgccagagcatcagcttctccggcctgccctctggccgccggacctcaccaccaccaccaggcctggccggcccttccctgtcctccagctccttctcgccctccagctccccaccaccacctggggaccttccactgtcaccctctgccttctctgctgcccctggcacccccctggctcgaagagaccccaccccagtctgttgcccctcctgccgaagggccactcctatcagcgtctgggggcccttgggtggcctggttcggaccccctctgtacagtccctgggatccgaccctgatgaatatgccagcagcggcagcagcctggggggctctgactctcccgtcttcgaggcgggagtttttgcaccaccccagcccgtggcagccccccggcgactccccatcttcaatcgcatctctgtttctgagtgacaaagtgactgcccggtcagatcagctggatctcagcggggagccacgtctcttgcactgtggtctctgcatggaccccagggctgtggggacttgggggacagtaatcaagtaatccccttttccagaatgcattaacccactcccctgacctcacgctggggcaggtccccaagtgtgcaagctcagtattcatgatggtgggggatggagtgtcttccgaggttcttgggggaaaaaaaattgtagcatatttaagggaggcaatgaaccctctcccccacctcttccctgcccaaatctgtctcctagaatcttatgtgctgtgaataataggccttcactgcccctccagtttttatagacctgaggttccagtgtctcctggtaactggaacctctcctgagggggaatcctggtgctcaaattaccctccaaaagcaagtagccaaagccgttgccaaaccccacccataaatcaatgggccctttatttatgacgactttatttattctaatatgattttatagtatttatatatattgggtcgtctgcttcccttgtatttttcttcctttttttgtaatattgaaaacgacgatataattattataagtagactataatatatttagtaatatatattattaccttaaaagtctatttttgtgttttgggcatttttaaataaacaatctgagtgtaagctgggatcctggcttcttcgcggtctagagacaggaatggagagggagggggtgactttttggaagctgggtgcagttaactcttcctctccgagccccgcggcgcttacctggcaggaagtgacgtcaccgggcctggccgttcacctgaaagggtgggaccaggtgaggtcaccagatgggaaccgggggagccagttcccgggcgtcgggggcgccgcgctcccgtcctgctgggctccttgacccagcttcgggcgggtgcggtcggggacgggatgtttccgtccccacggggccgcgggaggcgggaggggccgggtggggaggacggaatgtgctggggcgcgcgcccagagcgagcgggggcgggcgcggggcggggcagcctggggtagcggaacccgtttcgggactagaggttccgggggggcttcgacaccttctggatgttggggaagcgggtttagggtctcaagaggctaggatctcaacatttgggagtcacaggttgcatcccctagcgctttagactctagacccctggtggctcggagttgcagatttctggccacccgggaccctggagcccgggaattaccgggtcttggcatttccgaaccttggaagtccgaggcttcgcacaccgaccagggtcggccccgcgaggccagggcgtgtgggtaggggccgcgcgtctaggaggggccccgggggagccgcgtcttcagaccatacaaggccagcgtcgtcgggaccaaccccggggccccgcgcccggaagccgccctgcgtcagcgcctgcggctcggccctgccgcccagccttcgccccctgcgacccctcttttttctccttgccccgcactcctccctcctccctctcacttccctcttctctcctttccctaccctcacccttcctcctctttttcacttcctcctctgcacccttctgccccgccctacaccctttgccttctgttcttctctccccctccaatttgtcccctccctcattactcctctcccacttccagcctccccatcctgccgtctcttaccccctttctcctccttcccgtctcccttctctccctttttccgtccttctttccctctccaccctttccttgccctcccactccccattgtcctcttcccctcctccccctagccttactccttctcctcttctctctccctctgaagcccctttccctcctctcccttctctctaccctcctcaagcctccctcctgctctcaggcctccttggcccactccccttgctcactgacatttggtctcctcttccaggaaactgcttcccttgtgggaaagggctcaggccctaataagtagaagaggatcaggcgagagggagtcagaacccctgagatgcaaaggcagcagaggggcagagaccaagagcaagcagtgaagagacatttgcagaaacagtcttggagactgaaagaacaacatctctggtccttcctttagccagatctgattctctgccccttccccaaaaaatccctcatataagaaaacggcacttctcaccatctaccagggcttaagccagacacccaggagtatcccttgacaccttgttctcaaatccacaccccagtccaacagcaatcctgtctgatccacctgcaaaatagatccactatccacctgcccccaccatgacccccaccctggtcctagccaacatcgtctgccatttgcatcttcatagcagccccagccccagtctctgctctagcccctgccttcagtctctcctttctccactcccccacgagacaaccaaaggaagcctgttatgagacctgagtcaggtcacataaaagtcaaagtccgaagtcctccccacagcccacacaatctggcacccatcgcttaccctcccccttggccactctgctccagccacactggcctcctagctgctctaccaagtctggtctgcttcatccataggagctttgcactagctgttccctctgcctgaacactcccctggtgtccccatggctcactcccctccttcatgtctctgctcaaaagttgccttctctgtgagatcctccctgaccactgctgttgcaatccacaccccacctccaactaccccatcctccctaccttgctcgactttttccatgacatttatcatcaccacctaacattaaaatgtacttaattcttatgttgacagcaatctgcctccccactagaatgtcgcgtcctcaggggcagggactacttgttcactgctgtattacacacagctaaaggaagccaggcatagtgaatgttcaatatttattgaaaaaacaagtcgactcaaaaacatagttttccttttcaacagaggtcgaaaactccaagacagatagctatgttcatctgtaaaggaggcattaaaaagacagagaaatacagaggaggcagagtcatatacagtttgccgaggacccacatctctacagaagtcaaactgtttgcacacaattccatgcccagagcatctaataagagacgatacccccacctggtggctgggacggaaacggcacctccctacaatacagaacacccaaaggaccgtcgccaaagccctaggagtcttttgagcccaataattcaaaagatagaaacgttcattcatctaagtgatgtagatgttttggttggtttattagatgtgtaagtttataaaaactgatggggaaaaaaagtgctccaggtgaggatcgaactcacaacctcggcattgctccgctcgcactgtcatataagtaccgcgcgctaaccgattgcgccactggagctccggccgcacccctgcgccggggtcttcttcagtggttcatagccacgtgacctcaccggagggccccgccttgtgttatatatgcaaattaaacattttgcattgaccaataggagacagtgcattgccagttccggattctcacgcctcgcggcccttgctgtaaaagggaaaagtccgcgaggcgtttggaatgtaggggtgtcgcctaccagaaggacacgcctcctcatgaatattcaaaacaaggggtggggtcttaacccttcgctggcgggtcggccggaaggcagcccctcccccccccgcaggcgggaacaggatgtgagccccggcgacagcgggggaggggaagccccgggcgaccgccccccgcctcacagctgggatcggactctcccgccccagatgtggcgccgccgccgtcacacgagccccgtgacacccagccgggagcccgaggggtccagaggctcggacccgggcgtccggaatttctgcaccgcatcctgagagaccccgaggtccagaccccggcgcccaggctggaggacttgagccatccaggtgcgcagcgccccctcctggagcagccgggagcccggacgtcaccccgcgagaccctggaggccgagcgccccgtatccccgtttcaagaactcaggatccaggaccgcagactccctccagggctccgatcccaagaccccgcgttggaggaacttgagatccggacttctaagcgccccaaccagtttcgggctgcagcggccatcgcttcaaggggacccaggactttgggacccccctgtgctcccacctggagggagtttcattcctgcccctagaattaggggaactcagaaatccatcccccaccccacggccctacctagaagacttaggaatgtgggtccccagcgccgccatctgagactccagagtcgaggctcctagcatcccctacgtagaacactgagaaattccgactgcgggaccccagtctccgagagaccccagattctattcctggagcctgagagcccgaagttcacgcccctgagtctgggctccgcacctccctggggaccgcgtcggggtcgcgcaggagccgggctgcctcgagccggggctggaggctccccgggaggtgaggggggaggcgaggggcccaggcggactgggggagggggcggcgccactgctgaacaatgagggggcgtgccggcggggggcgagccgaggcgccggcgggagttgggggctggaggggtgtgggaaggcgctggggaggctgtggctgtggggacggcgatcggggttcggagagaccggccggagggggtgcgagggctcggggccagcgccccagcgcgcagccctcggcgggggagggagccgtctgcaggaccctggcatccggtcccccagcctccgccctcccctgggaccccgcggcctcccgcccacggcttttcccagccctgcccctcgccctccgctccagctggagcccaaacgttcccaggatccctaagcctccggccccagacaaacgggactcgcagcttctgcgcctcctgctccgctcactcttctttgtctcagcctttccatctttttcgccaggttctctctccttgtccccttctttctgtcactttgtgcctcccccattagttactcccaggggcccctccctggatttacaccacgctcctaattcccagcccccatctgtgagtctgggcggcggagaggcccatggggtcctgatatccaagaaggggctctttctgcaggactctgctgggccgctcagccatgcctgagggagcccaaggactgagcctctccaaacctagcccaagcctcgggtgtggccgaagaggtgaagtgtgtgactgtggcaccgtgtgtgagactcggacaggtgagcctagaggcaggggcggcggagcctgtggggcttttattccttggcaatgctgtcaaggcagggtgatggagacaaccccaggccaactcgcacaaagctccgagtctggtggggaaggcgggcccatccccaggcaatgacaggccagagggggcagcgctgggcagagtggtcagggctgtgatcgtggatcctctgagctcggaaggtcaggggaaggttcctggaggtgggaacatctcaactgggaagtggaagattagggggaaggagttgcgcaaagacaaggaagagtattctacatgcaaggaacagcatgtgcaaaggcccagcggtgagaaaaggctgcatgtaagtgactgaaagaagttgagtgtcactggcatccagagtgtaagaagaggggtggctgtgggaagagaactggctagagggatctgtgttggccacattgcccagtgccctgtggatctgaggagtttggactttatccccaggggcatgaaggggttacactcacgggagtaatacagtcagatagacaaattaataaatgtctacctagctgattcatggaggtggattagagaaatggaggccagaagtccagagaggaccctgatgggagaggatgggactggaccaagacagggcagtggggagaggaggaaggagcctgtgggaaagctgttggacaggtgtgggtgagggtgtgggctgaacgcatgaaaggctgtggaagtccgtgcatggggagatttctctgacctcctgttccacaccccagcagctcctgcagcccccaccatggcctccccccgaggttctgggagctccacatccctgagcacagtgggctctgagggggatccagcccctgggcccactccagcctgctcagcctccaggccagagccccttccagggcctcccatccgcctacatctctctccggtggggatcccaggttcagccagaccctcaaggctggagcgtgtggcccgggagatcgtggagacagaacgggcctatgtcagggacctccgcagcatcgtggaggtaaggcgggcagacaccagagggcagtgggtacccaggccagccccttggcccccataaccccagtcatcccaacaggactacctgggccctctgctggacggcggggtcctggggctgagcgtggagcaggtgggcacgctgtttgccaacattgaggacatctacgagttcagcaggtcaggggcaggggggacaggcagggggcattgattggttggagggtctatttcctaatccaaacctcggagcttcgtagtgtcctgtccaggctggtacgtggggttgtgacattgggcaaggatcagggatcacgactgggagggaggaccccgagtgagggaggggcataggggatgggaggaccccgagtgagggaggggcatagcggatgggaggaccccgagtgagggaggggcatagcggatgggaggaccccgagtgagggaggggcatagcggatgggagtcagaggacctggatgaagcccaaacactgggacagggtcccggcatcaggacgagtccttggggctgtgtcaggtctgggctcacgatgaatccaagaatcatatggggcctgaaggccgagacagcgtgagcatgcgagtgaccccctaagcctgatttgcctgggacttttccagttttagcactgaaagccctcgtcctaggaaactgctcagtcccggacaaaccaggatggttggtcactgtggtaaggaggactctggggtccaaggatcatgacatttccaagtaccttgacgaggtctcgggattacagcaggaacttaagatcatcctagctctttgggtcatgatataacacccctaggctcatgccagcactgacacaagttcaagctgaggaatgagaagctgtccagggacaaagtctaagcaggttaccatgccccgtgtagccctcagaggacccttcctccggacatgacatccccttaggagatgctggcagtcagcaagcccccagccccagcagaccattggggcctcagcctcctggaggcctcccatggaggggtcgtgaaggcaggcggttcctcaccctcccctctcccctgtagcgagctcctggaggacttggagaacagcagcagcgccgggggtattgccgagtgcttcgtgcagagggtgagtggaggggtggggggctctcggtcctggatggggcctttgtagaggggggagagcaggcttgggctaggctggaaggggggtcgtgggaagccaggacctggggtctccctgactcccatgtcacccgcagagcgaggattttgacatctacacattgtactgcatgaactacccgaggtgaggggcaggagcccctgctgggcctcaggctgtgcccacaagctgatgtgccagtcacccgtcaccctccctctacccccgacccatccagcaccgacccctgccaggctgtgacagtaactgacctctccctcactgccccgccccctgtcagaccctgacccttcccaaaccctggcccctccctaacccctcttgaccccgcccactggaactgacaatccccactgacctgtgctgtgcccccagctccctggccctgctccgggagctgtcgttgtctccgccagcagccctgtggctgcaggagcgccaggcccagcttcgccactcgctgcccctgcagagcttcctgctgaaacctgtccagcgcattctcaagtaccatctgctgctgcaggtcagctggggcccctggagccaggctggggagggggaggtcctgtcccttgaccacctgttggttcatctggaggatggaccccccacgagttgggcaaggcctcccaaagtgctgggattacaggcgtgagccaccgcgcacagccctagcttttttttttccctttgaggtggagtttcactcttgtcgatgaggctggagtacagtggtgcgatcttggctcactgcaacctccacctcctgggttcaagtgattctccttgctcagcctcctgagtagctaggattacaggcgcacaccaccatgcccagctaatttttgtatttttaatagggacggggtttcactacgttggccgggctagtctcgaactcctggcctcaggtgatttgcccacctcagcctcccaaagtgctgggattacagacatgagccactgcgcctggcctctgcccctatctttatatttctccatctcctgttattctcattctctttctccttctctgtttctctccccatccctgcgtgcctggtggctgcctgacaggaactagggaagcactgggcggagggcccaggcactgggggtcgcgagatggtggaggaagctattgtgtccatgacagcggttgcctggtacatcaacgacatgaagcgcaagcaggagcatgcagcgcgcctccaggtggccccagggtgggctggggcttgctggatgagggagtgagcgagggggccttggggcgggtggggggaaatcagtgcctcagaggtagccttggagggttggctgggacagcatggccctgttgctaaccccctgttttggtgtgtatgtgtgtgccacctacccatgcttgtctctgcgccccggcgcacctggcggggtcccggcaggaagtgcagcggcggctgggtggctggaccggaccagagctcagtgcttttggggaactggtgttggagggcgcgttccgaggaggcggagggggtggcccccggctacgagggggtgagcggctgctcttcctgttctctcggatgctgctggtggccaagcgcagggggctggagtacacctacaaaggccacatcttcgtgagtttggggatggggtggggctagaatactacctacaaagtatatcccatatacctgtatctgtgtgcccggcagtgtgggccaggggaccctgccacattttcttgagttagagaatggaagccaagggaagctttctttctagtgtatagaatgagagctgccccacttaagaaaaaaaaggagaaggctgggcgtggtggctcattcctgtaatccgagcactttgggaggtcaaggcgggcggatcacttgaggtcaggagttcgagaccagcctagccaacgtggtgaaaccccgtctctactaaaaatacaaaaattagctggacgtggtggcaagtgcctgtaatcccagctactggggaggctgaggcaggagaattacttgaacccaggaggcggaggttgcaataagccaagatcatgccactgcactccagcctgggtgacagagcaagactctgtctcaaaaaaaaaaaagggagaggaaacccaccatacagccttatgggatgcatcttcctagggaggaggacccagatacacctccaagggtgtctccgtacaaggggcatcactgagcccaaggactctgagcttgctacccctctctttccttccagtgctgcaacctgagcgtgagcgagagtccccgagaccctctagggttcaaggtgtctgatctgaccattcccaagcacagacacctgctccaggtgagcatgtagtgggatcaggctggcagggatcccccagcctcgagacctcacacctggccccctgactctactccaacccactcctaggccaagaaccaagaagagaagaggctgtggattcactgtctccagcgcctcttctttgagaaccaccctgcctccatccctgccaaggtacagctcctgccgcagccgggggccctctgagtgctggagacaccctcccccaatagtactaagagacgcccctgcccaatgccagagcagtctgttataatgtgattgctaaaagtgcagaattccgctacttgggtttgaatcttagctctaccatgtccctgctttgtgaccttgggcaagtaacttaacctctctgagccttaacttcctcacctagaggaatgaaagcgccttcatcctagggttgtggtgatgagtaatggtcaccagccacgtcatgggcttgaccaatagaagcacccatcagctggctgtggtggctcatgcctataatcccagcacttcgagggggtgatgtgggaggatcatttaagcccgggagttcgataccagcttgggcaacatagtgagaccctgtctctaaaaaacattttttaattagctggggctggccaggcacggtggctcacacctgtaatcccaacactttgggagaccaaggcgggcggatcacctgaggtcaggagttcaagagcagcctgaccgacatggagaaaccccatctctactaaaaaatacaaaattaggccgggcgcggtggctcatgcctgtaatcccagcactttgggaggccgaggcgggcggatcacgaggtccggagatcgagaccatcctggctaacatggtgaaaccccatctctaccaaaaatacaaaaaattagccaggcgtggtggcaggtgcccgtagtcccagctactcgggaggctgaggcaggagaatggcgtgaacccaggaggcaagagcttgcagtgagcctaggttgcgtcactgcgctctccagactgggcaacagagtgagcctctgtctcaaaaaaaaaaaagaaaaagaaaaattagctgggcatggtggcgcatgcctgtaatcccagctactagggaggctgaggcaggagaatcacttgtacctgggaggcggaacttgcggtgagccgagatcatgccattgcactccagcctgggcaagaagagcgaaactccgtctcaaaaaaataaaaataaaatagctgggctggacgtggtggttcacgcctgtaatcccagcacttcgggaggccaaggcgggtggatcacctgaggttaggagttcaagaccagcctggtcaacatggtgaaaccccgtctctactaaaaacacaaaaattaccgggtgtggtagcgggcacctgtaatcccagcaactcaagaggctgaggcaggagaatcgcttgaacccaggaggcagagggtgcagtgagccgaaatcgcgcctttgcactccaacctcggcaacaagagcaaaatctccgtctcaaaaaaaaaaaaaaattagctggatgtgatggtgcacatatgaaatcccagctactcaggagggtgaggtgggaagatcgcttgatcccagaagtagaggctggagtgagctatgattgcaccactgtactccaacctggcgtatagagcaagatctaaaaacaaaaacagcacccattaatgggcatgactacggtgcttaaagtatcctctctgtggtactccaagatcgacccacctcagccctcatcctcctgtctttcaggcaaagcaagttctccttgaaaacagcctgcattgtgagttggggccttgggctgggagggtgtggaagtagacgaattacttccaagaaaaagttggcttttagccccaaaactctccccacaggtgcccccaaaagtaagcctgtcctagagcccctgacacccccacttgggtctcctcgacctcgagatgctagaagttttacccctgggcgaaggaacacaggtaaaggcggtggatccctgagtcccagccctcagccccacttccctaggacccgggagctgggctcacacagggctctggccctccctcccacagctccatctcctgggccctctgtgattcgccgaggccgcaggcagtctggtgagcactcacccctaagggtgatccaggcatcggggtgggagctgggctcctgacatcactgtgtcctccccgcagagccggtgaaggacccttatgtcatgttcccacagaacggtcagtgactgccccggttcagcctggtccatccctgtctgtcgcccggtgggatgtctggggcgggttggggaggggtggttgcttcagctcatcagttatgggggaatcactctttttcccttacatctcactaatgcttctctctctctcatctctccatccttagctaagcctggattcaaggtaagagatatctcgagatagggtctgggcaccttgacttctgggtctgatggagaagggagcttgagttccaaaatcctgggtctgaatgagaaggggattggggccagacagagtaactcatgcctgtaatctcagtattttgggaggtcaaggcaggaggattgctcgagcccaggagtttgagaccagtctgggcaacatggcaaaaccccatctctacaaaaagtacaaaaaaattagccaggcacactagtgcatgcccatagtcccagctactcaggagactgaggtgggaggattgcttgagcctgggaggcagaggttgcaaaatgagctgggacacaccactgcactccagcatgggtcacagtgagaccctgtctcaaataaataaataaaaattttaagagaaaaataaaaaaatttaaaaattgagccaggtacggtggctcacctgtaatcccagcactttgggaggccgaggtaggtggatcatctgagatcaggaatttgagaccaggctggccaacaaggagaaaccccgactctactaaaaatacaaaaattagctggacattgtggcaggcgcctgtaatcccagctactcaggaggctgaggcagcagaatcgcttgaacccgggaggcggagattgcagtgagcagagatggcgccattgcactgcaggctgggcgacagagcgagactccatctcaaaacaaacaaacgcaaaagaaggggattgggacttggggtcctctatgtgagggaggagtcttggctcttgccttccattgctttccctcctcacagcacgctggcagcgaaggggaactctaccctccagaatctcagccaccagtttcaggctctgcaccccctgaggacctggaggatgctggacccccaacactggacccctctgggacctcaatcactgaagaaatcctggaactgctgaatcagcgaggccttcgagatccaggggtgagctggctgtcccatcatggtgtccttgggcctctgggtgtgggcacacagaccagggaccagataggccagcccatgctgatacctttattttttttttatttgagatggagtcttgctctgttgccgaggctggagtgcagtggcgccatctcggctcactgcaagctctgcctcccaggttcaagcgattctcctgcctcagcctcctgagtagctgggactacaggcacccgccaacacacccggctaattttttttttttttttgtatttttagtagagacagggtttcactatgttggccaggctggtctcgaactcgtaacctcaagtgacccgcccacttcagcctcccaaagtgctgggattacaggcgtgagccaccacacccagctaccatgctgatatgtttggcttgttctcctgtgcccactatagccgtccacccatgacattcccaagttccccggagactcccaggtgcctggcgacagcgaaaccctcacattccaagccctgcccagccgggactcttcagaagaggaggaggaggaagaggaagggctggagatggatgaacgggggccttccccactccacgtcctggaagggctcgaaagttccattgcagctgaaatgcccagcattccctgccttaccaaaattcctgacgtgcccaaccttcctgaaattcccagccgctgtgaaattcccgaaggttctcgccttcctagtctctctgacatttccgatgtttttgagatgccctgccttccagccatacctagtgtccccaacacccccagtctgtctagcactcccaccctctcctgtgactcctggctccaagggcctctgcaggaaccagctgaggctccagccaccaggagagaactgttttctgggagcaatcctgggaaactgggagagccgccttcaggaggcaaggcagggccagaggaggatgaagaaggggtatcattcacagacttccagccccaggatgtcacccaacatcagggattcccagatgagctggcattccgctcttgctcagaaatccggagcgcctggcaggcattggaacagggacagctggcccggccaggcttcccagagccactgctgatcctggaggattcggatctgggtggagacagcgggagcgggaaggcaggagccccgagttcagaaaggacggcgtcccgagtgcgagagctggcccggctttacagcgagcggatccagcagatgcagcgggcggagactcgggcatcagccaatgccccgcgccgccggcctcgggttctggcccaaccccagccatccccctgtctgccccaggagcaggcagagccaggtgaggtccgggtacgtggttggcagaggtggtccccgctggagtagtggtcctgactcgatcctcttttcgcattcagggctcctgcctgcctttggacacgtgctggtatgtgagctggccttcccactgacatgtgcccaggagtctgtccccctgggtcctgctgtctgggttcaagctgccatacctttgtcaaagcagggaggcagcccggatggccagggtctacatgtttccaatttgcctaagcaagaccttccgggcatccacgtttcagctgctacccttttgcctgagcaaggaggttcccggcatgtccaggctccagccgccacacctttgcccaagcaagaaggccccctgcacctccaggtgccggctcttacaactttctctgatcaaggccacccagaaatccaagttccagccaccactcctttgcctgagcatagaagtcacatggttataccagctccatccaccgccttttgtcctgagcagggacactgtgcggacatccacgttcccaccactccagctttgcccaaggagatttgttctgatttcacagtttcagtcaccacccctgtgcccaagcaagaaggtcacctagacagcgagagcccaaccaatatcccactgacaaagcaaggaggttccagggatgttcagggcccagaccctgtctgcagtcaacccatccagcctttgtcttggcatggaagcagcctggatccccagggcccaggcgacaccctaccacccttgccatgtcacctcccagaccttcagattccaggtacctcacctttgcctgcacatggaagccacctggaccatcggatcccagccaacgccccactgtctttgtcccaggagctcccagacactcaggttccagctaccacacctttgcccctgccacaagtcctcacagacatctgggtccaagccctcccaacttcacccaagcagggaagcctcccagacatccagggtccagcggctgcacctccacttccggagccaagccttacagatacacaggtccaaaaactcacaccttcgttggagcagaagagcctcatagatgcccatgttccagctgccacacctttacctgagagaggaggctctctagacattcagggcctctcacccaccccagttcagaccaccatggttttgtccaaaccaggaggctccttagcctctcacgttgccaggttggagtcttcagacttgacgccacctcatagtcccccaccttccagccgtcagctcctgggccccaatgcagctgccctctccagatacctggcagcctcatatatcagccagagcctggctcggcggcaggggcctgggggaggggcccccgcagcctcccggggctcctggtcctctgctcccacgtcacgggcatcttcgccgcccccccagccccagccaccacctcccccagccaggcggctcagctatgccacgacggttaacatccacgtgggcgggggtgggcggctgcggccagccaaggcccaggtccggttgaaccaccctgctctcttggcctccacacaggaatctatgggccttcacagggcccagggggctcctgatgcccccttccacatgtgagccaggacatgaggcttccctgaagcaaggatttcagccagatgccatagaccctcagaacttgacctggaagtccagacactgaacgcaggcctcaaaactgctgcggccttccaactcctggtatctgcatcggcgaatggcccttcttgccttgatccacagggatggggaagggaggaatgtcattaatgttttgttaatactgattctttcatgcaatgatgtgtattttcccattctggaggctgtgggagatgacaagacaatgaatgggaaggtctgacacagaacaaatcagcggttctgaaagcttggggaatctcagactcctttgagaattattggaaaatggacccactataacttggcgtgtgtgtgaactgcttgatgcccatccaggaaagccaagttaagaagctttgcttcaagtagacactagaaatccattcccttggcaatttatacagttcacgtctcccaccatccgttcatctcacccaccctgccatctctccacctatccatctggctattgctccatctagctttcccgctccatctacccatcttccaatccatcatctcacgtatctgccttgcttatccaactgtctgccttattcacccacccatccctttatcattctaaccccatctggcattccatccctccatttatccatcttcccacttacccatcttctccatccagcactccgttcatcagtccgtctctccctccatatttccatctgtccattcatccactcattttgccatccatacatattcacccagccatctcccaatccatcgacataccccatccctccctcactggactctccggggtcttagtactatgatacttcagagacaattccatgctgatacgggggagatcaattttggggctctgggataagtctgtcccacatctgtctgatttcccttggcatccttcccgtcagttcctcttgaatatcccagttcttgtacccactcacatacctcagatcccttcactcctccccgcagtttgcagcctctacaattcatccacatgctccctcccccagcaaaataattcaggtcgtggagacaaaaggcttttatgttaggttctgtctgcccccttgttccagcagtggtatgcccagtgagaggcacaatttaaacggtttctttggtgatgatattagctactttcatcaaatacttagcctcttgtgctttagcacattatttatgtaagctcccctaggattctctgaagcaccctggtgtcctggctgtgaattcaagtcccatctttacttatttggtgtgggtcctccctctgagccggttttctcatctacaaaatgaagacaacagtacttccctcctgggatcattgaaagatttagggagcatatccttccacttcccaaacatatttgaacctctgacttgcttaggagcatcattcaaatcacagatcccccagtatctagtcccaacctattgaatcaggatccccagggaaggaggagcttgggaatctgatttttttttttttttttagataaagtctcactctgtcacccaggcttgagtgcagtggcaaaatcttggctcattgcaacctccacctcctgggttcaagcaattctcatgcctcagcttcccgacatagctgggattataggcgtgcaccaccatgcccagctaatttttcgttgttgttgttgttgttttgtttttgagacagagtctcgctctgttgcccaggctggagtacagtggcacgatcttggctcactgcaagctccgcttcccgggttcacgccattctcctgcctcagcctcccgagtagctgggaccacaggtgcccgccaccacgcccggctaatttttttggtatttttagtagagacggggttttaccatgttagccaggatggtctcgatctcctgacctcgtgatcctcccgcctcggcctcccaaagtgctggcattacaggcgtgagccatcattcctggctgggaatccgaatttttttttttttttagacggagtttcgctcttgttgcccaggctggagttcaatagcatgatctcggctcactgcaacctctgcctcccaggttcaagtgattctcctgcctctagctgggattgcaggcgcccacgaccacgcccagctaatttttgtattttgtagtagagacgggatttcgccatattggccaggccatagtggtcttggactcctgacctcaggtgatccgcccacctcggcctcccaaagtgttgggtttacaggcgtgagctaccataccctgcccaggaatctgaatttttagcaatcagttagcagcaaataagctgagatttcctgggtactaagcacatactatgagcattacagccgctttatataagctcgttcactgtcctcattacattcctaatatgcaagtgagcatgttttttaatcctcagtctagaggtgaggaaactgaggcaggcacagagaggctaagggatttgcctagtcgcacagctaggaaggtgcagcactgagactcgaatccacacagcttggcttaagtctaccattaaatttgcctgtcctggccaggtgcggtggctcacgcctgtaatcccaacacttcgtgaggccaaggcaggtggatcacttgaagtgaggagttcgagaccacaccagcctggccaacatggtgaaatcccgtctttactaaaaatacaaaaaattagctgggcgtggtggtgggtgccggtaatcctagctactcaggaggctgaggcaggagaatcacttgaacctgggaggtggaggttgcagtgaaccgagattgcgccactagactccagcctgggagacgagcaaaactgtctcaaaaaaataaaatgaaatacataaataaatgtgcctatcctgtgccgggtgctgttcttgccagtggggatacatgagagaacactgccttgcccgcatgaggcttgtggcctggtactgtgcacacctcaggggattctgataattagctgagcacagttgccagcacagggcctggctcaataaatattagctgctggcttctgctcacttactgtttattgactggctactgtacaccagggccgaggctgtgtcccgggggccccgtggtgacggaggtgaactcctcagcctggagtgatccactccactggagcctccccaaggtcaggaccgcagccgacgctcccctcctccgccccagctgcacattcccggctgaaggaaagttctcagcctggcccaggctcccagcggcgtcggaattcccggtattcgaggaggcagggagggagaaggggcctgtctactccaaggcctggagctgggaaggagaggcaagcccctttccagtccagatgtgtcccagctgtgcctctgggaaagagccaggagcctcaataagggggtctctggaccccctgggaaaaccatgggcgccaggcttgcctccacccctcctcctggcatctgtgaattccattcctccctcccgcccaactcctactgctgcttcccagccccagctctgtcgccttctcaggaatacctttcctgctggcctaccttggttctgagcccagtcctcctcagagctacagctaaatcaggctccgaaaggataaggatggtgcctgctgtcctctctgggacatttaggttaatgccagctaaaccagttaaccggagttaactctggctgcgatgcaaaacttggcgagccgcaaaacattttgccactagggtagttttctcatcctgtgtcaccaacctcacagggatgtggccacctccaacaaccacctacctgatgctccatgaaccccactcctttactttttctttttttttctttttttgaggaggagtcttgctctgtcgcccagagctgaagtgcagtggcgcaatgtcagctcactgcaacctctacctcctgggttcaagcgattctcctgcctcagcctccagagtagctgggactacaggcacgtgccactatgctcagctaattttgtacttttagtagagacagggtttcactgtgttggccaggctagtctcgaactcctgacctcaagtgatctgcctgcctctgcctcccaaagcgctgggattacaagaacgagttgctgcgcccggccccccactcctttactttttattttatttatttatttatttgagacggagtctccctatgttgcccaggctggagtgcagtggtgcgatcttggctcactgcaacctctgccgctggagttcagtggtgcgatcttggctcactgcaacctctgccgctggagttcaatggtgcgatcttggctcactgcaacctctgcctctggggttcaagtgattctcctgcctcagcctcccaagtagctgggattgcaggcgagtgccaccacgcccagctaatttttttgtatttttggtagaaacagggtttcaccatgttggccaggctggtctcaaactccagacctcgtgatccacccacctcggcctcctaaagtgctgggattacaggcatgagccaccgtgcctggccttttttcttttttgagacggacccttgctctgtggctcaggttggagtgcagcggcaaggtctcagctcactgcaacctctacctccagggttcaagcaattttcctgtctcagcctcctgagtagctgggactacaggcacacgccaccacacccagatagtttttgtatttttagtaaagacggggtttcaccatattggtcaggctggtctccaactcctgacctcaggtgatccacccgccttggcctcccaaagtgctgcgattacagatgtgagccaccacgcctggcttttttttttttttttttttgaggcggagtctcgctctgtcgtccaggccagagtacagtggtgcaatctctcagctcactgcaacctccacctcccgggttcaagccattctcctgcctcagcctcccaaacagctgggacgacaggcacccgccaccatgcccagcctttttttttttttttgtatttttagtagagaccaggtttcgccatgctggcaaggctggtctcgaactcctgacctcaagccatccacctgccttggcctcccaaagtgctgggattacaggcgtgagccactgggcccagcccccgactcattttatgtatcctgtgtcagtgctgtcccatataaccttccttgatgacggaaatgttctaatatgtgcagccccgcttggtagccatacatggcttctgagcactggctactgtattaactagggtagatacatagaaagtgggcaagtggacagaaaatctcaagttgtaaaacattccccctgagcatttaggtgcgggacttccctattggctgcagaggctggaactaggaagtagaaatctctgcgctccccaaacaatgaagttcactcgcttcctatgagtcattagccactcaacgaagtcctcacttaacgtcatcaataggttctgggaaaccgtgaccttaagcgaaacgacgtataaggaaaccagtttgtttaaaggactgttattacaggatctgcttgttttgcttaagtccgtttccaagcacctatacaaaacgctgaggatgcactgtgctttgaagcccaactcctcttccagcaccggcagcaacccttgcgtcatttgtgactccttgggagggggaagagggctgtggtcactcagtgccccatgacgagcacatggcccggcacaggtgttcaaggaaagtgaatgagcaagttgaggccacagacacccgaaaacaactcatcacagacatggtctccctggctactcttcctaccggccagcagaccctggttcccatgtcctctcccccaaggagtccacctgactcctccaggctgtcaggcaccgcttgagtcccacagcctcttgtgcttttcccacaagcggccaccctgactccttagctcctcatgttgaggggccacagggtagagatggggcctcttgagcagatctgtgacaacctaaactagtagtcaagaacctgggctctaggtcgggcgcggtggctcacgcctgttaatcccagcacttcgagaggccaaggcagggggatctacctgaggtcaggagttcaagatcagcctggataacatagtgaaacccacgtctctactaaaaatacaaaaatcagtcaggtgtggtggcacttgcctgtagtcccagctactcaggaggctgaggcagaattgcttgaacccggaaggcggaggttgcagtgagctgagattgtgcagctacactccagcctgggtgacagagcaagactccgtctccaaaaaaaaaaaaggcgggggggggggggcaggtgtggcggctcacacttgtaatcccagcactttgggaggccatggcgggtagattacctgaggtcaggagttccagaccagcctggccaacgtggtgaaaccgtctctactaaaaatagaacaattagctgggcaaggtggcaggcgcctgtaatcccagctactcgggaggctgagacaggagaattgcttgaacccgggaggcggaggttgcggtgagccgagatcacgccattgcactccagccagggatacaagagcaaaactctgtctcaaaaaaaagaaaaagaaaaaaaaagaacctggggtcttccacagcccggttacctgtccaaaatgccactttgggctcggcatggtggctcatgcctgtaatcccagcactttgggaggctgtggcaggaggatcacttgaggttaggagttcaagaccagccttgccaacatggtgaaaccccatctctactaaaaatacaaaaattaggctgggtgcagtggctcacgcctataatcccagcgctttaggaggcagagtcgggtgatcacttgaggtcaggatttcaagaccaaccttgccaacatgttgaaaccctgtctctacttaaaaaaaaaaaaattagctgggtgtggcaggcgcctgttcaagcaattctttccttcagcctcccaagtagctggattacaggcgcctgccaccatacctaatttttgtacttttaatagagatgaggtttcaccatcttggccaggctgatctttaactcctgaccttgtaatccaccagccttggcctctcagagtgatgggattacagtcgtgagccaccgtgcccgactctccttgttttctttgtattaaagattattggctaggcatggtagctcacacctgtaacctggacacattgggaagatgaggcaggaggattgcctgaggtcaggagaccacgcctgggcaacatagtgagacctgtctctacaaaaacaaaaattcagctgggggtggtggctctcgcctgtaatcccagcactttgggaggcccgggaaggcggatcacttgaggtcaggagtttgagaccagcctgaccaacacagtgaaacccatcgatactaaaaatacaaaattagcatggcgtggtggtgggtacctgtaatccaagctatttgggaggctgggcttgaaaaaaatagacatccacaaggatgagccatatatccgccaaggtctgcagccactaatggccccaaacgactgccatctcagctttgcctgcacactggactctactggaggtgtagagacagagaccccctgccttctgcttccactcacccacaccaagcccagcgcgaccacttctggggagggtcaaaatccagactggcaataggtccaggatgtttactgatttctgtctggttaaacatccaataccaacacataaggccacacacagttcttgaaactttaaaatccctcaaaaactgtttattatacaagtgagttttgagtcacgatgggcttatcggtaggatttctggtagcgagcgcgggcaccagggcctccaaactttttggactcgcagcgacgagggtcagctaccagcagggtccggtcatactggatgaggatgtctttgatctccttcttggaagcctcatccacatctggcaagaagagcagggacgaggatttagataatcacacagagtccttgacttgatccccacacacccatctacctcatgggaaggacccatgctcactcacatttctggtaataggccaccagggctttggagatggactgacggatagctgtgagaaagacacacaattaaagggtacaggagcgctgtgaaggcctccctcccagagccacctcctccatgcgcccagttcctgggactcaccataaatctgggccacgtgaccaccaccctttacacggacacggatgtctacaccagcaaatcgctccttgccgagaagcagaactggctccagcagctaaaggaatggggaatgaacagggatttaagttacatgctgggcagcttagccatctcactgggcttcttgtttctgtggcttctgccaccactggccttcaagtactagtggatgggggtcagggtgtcactccaaggccctctacagacccagagaagaggaaagtcaaaaaagccagatatgagactgctgaagtggtgttaagaaatataggcaaggtaaagggaacaagatctgggctccctcctacttgtgtccctcactggacctcagacaccctacctctaagactggttcttagaaggctgaacagtaaggagcattccaatagcttctgaaactcccaaggctgtttcaagtagtcgaaagccatccctggactgttcaggtgccttttctatttcccacctgagctctctgccctttctttgagcctcacaggtttccagaattacagtacaacctgtccctggtccctagacccttcccagctccaggtcttttaccagtgcctctgtctggatacttcctttacctgctttcagctcacaggtctccttccccagttctgaccactttggatcagcttctggtattgggcccagtccttctccccaactaggctggcaggtccatgaaggcaagaccttaagtcatctggatcactgctatgtccccaaaactcaacagagggtacacatacaaatccttcaaatacagtgacagccaataacagtaacattcaacatctgctacacaaaggaaatctcagaatttttattaaattctaggccaggcatggtgatcacacctgtaatcccagtccaggcagaaggatcacatgagaccaaggaccagcctgggcaataaagtgagaccccacgtctacagaaaaatatttctcaaatgagccaggcgtggtgatgtgcctgtagtcttggcaaccgaaaggctgaggtgggaggatctccaactcaggagtttaaggctgcagttcattaggattgtgctattgcactccagggtaggtgacagcaagatactgtttttaaaaaagaaccttataactcaaaaaaaatttttttaactgaccctgcaatgtagatattctttcttttaaaagtagtagagttcagaaggggcagaaatcagactctggtttctttccattctgagccaaagaaattgagagtcccaaaaagggaacagaggaaccccttttacaagcaagcatttaaacagacccaaattcggccgcacacggtggctgacgcctgcaatcccagcacttcgggaggccgaggctggtggatcacctgaggtaatgagttcgagaccactctggccaatatggcgaaaccccgtctctactaaaaatacaaaaattagccgggcgtggtggtgcatgcctgtaatctcagctactcaagaggctgaggcaggagaatcgctttaacccgggaggcgaaggttgcagtgatccgagatcgcgccactacactccagcctgggcgacacagcgagactccctctcaaaacaaataaataaaataaaaaatagtcggtgtcccttcaccctttgggtccccccgccccagtgaggtgagcttcctaacatcccagttctcaaagcaaacccttaatcttcaacaaccccatctcagcttttacatcttctgaaccccaagcccagctctattgccaaataccccactgttctacacccaacacaacttctaaacatcccgttgctgatgccagcccccccagctttcaagagctacaacatctctgtctccaagagtcctccatccactcaacgccggtgccggatcccagcaccttgtactgtagcgtgcgcggctcaatcatctccaggggccgcccgttcaccttgatgagaccattgccgcgtttgcagtgcgccacagctgtcgctgtcttctgtaagatacaagagaaacaggggccccgtgagctccggctccagctcccatgttaccccctagattcctgcccaccgacctctcccagaccctggccttctccttcccctccccttcccatccggcgtctggctcaccttgcgtccgaagacctgcacagactgcagcgggcccttggacggcatggctccgagcgtggactagacaacctcaccgcgcggcgccgcaaccggaaaaggaaagctaggggccaccctggccgcttttcagggtctgcgcaggcgccttgagcactgcgtcgcgacgggagagagctttacggcttctgttgcggctaacgggcggggcgtctggtcagcggcgggaaggcccttaggcgctcagagcgggcgggccctgtgaggcggaagtggcgggctctgtgggcggaaggggcggggcctgggagtgtcgtgtgcggactgaagggaaggctgcgggagtgtgcttcgcgtcctctgtagtcgactaccgcagctcttctttgcattctggctctttaataatctcccttcgccctttctttaaatcagttcccaccctcccaacacctgtaatctttctcccctctggactccctcctccccgaatcccccgcatcagaatcttcctttggaatctactgcaagaaatctggctggattctcagattaaggacttccagaatcctatcctccctagaatccccctccttggggatcctctcccagaatccttttcccctcagagccccttcccctcagaatctccctttcaccagaatgtccttcctttcagtttcctcttcccagaatgtttcccatccttctctcagatggccaaccccaaatgtccctcttaagagtgctcaacttagaccccccttttccctgaatctccctccattcggtcctcgtcccctcagtcacccttcccagaatctttctcttgtcaggacccagtacccctggaatctccctcctccagaatctccctttcccggcaaatccccctttcccggcaaatccccctttcccagaacaccccgccccgcaaatccacaaaaacttttctctcagagacccgtccctcaaaatctacctttctcctgagtttatttcccttccgagactcctcttcccagcaactgccttccctggagttttccctccgttagaatccccctctcctaagagaccctcccccaagaattaacctcttccccgtccccaccctagaatctctctcttttttttgagacggagtttcgctcgttgccctggctagagtgcagtggtgcgatctcgtctcactgcaacctccgcctcccgggttcaagagattctcctgccttaggctcccgagtagctggaattacaggcgtctaccaccacgccctggtcgttttttgtatttttagtagaaatggggtttcaccacgttggccaggctggtctcgaactcctgacctcaggtgatgtgatccgcctcagcctcccagagtcctgggattacaggcgtgagccaccacgcccggccgaatctctctgttttttgttttttttttttcttttttttgagacagagtcctgctctgtcgcccaggctggagtgcagtggcatgatctctgctcactgcaacctctgcctccccggttaaagcgattctcctgcctcagcctcttgagtagctgagattacaggcatgcaccaccacgcccggctaatttttgtatttgtagtagagacggggtttcaccatattggccagactggtctcgaactcctgacatcaaatgatccactcatctcagcctcccaaagtgctgggattacaggcgtgagccaccgcgcccagcccctagaatctctttctccagaatctcccagtcatctttttcctctcccccaaatcaccctccacttaagcctcctccccacagaattctccatccccagccccccaaccccacctgaggaaccccaggattgggttgtcctctggttccccggcagatgtccctgcgtctcaccccatcaagagtctccccagcgaagaggttcctctctcagagctagagggagcccacagttgcctcagtttctctggcagtacagggtctgggatccagggttcaaaagggcgtcgtggtgcaccttgccaaagagggtggagacagggagacactggagggcaggtctggggccagagggaaaagccagcccggagtccagctctaaaagggtgaggggggagggggctgttgggagggaggaaggaagtacccagaggctgaccgggagggacacagacacagcccaaagaaatgtaggcacaagtggagaagaagagaaagatgaaaggccaagggagaagaggaggagaaaagggagagaccaggacagtcaagagatggacccccaaaacaagcccagtgacagatttagaggcagagaggccaaccctcagacaaaaaagagataaaggcaggcatgatgtttccaaaatacttgagacagaggccaggtgcagtggctcacacctataatcccagcactttgggaggccaaggcagcaggatcactcgagcccagggttcaagaccagcctggccaacatggtgaaaccccgcctttactaaaaatacaaaaatcagctgggcatggtggcaggtgcctgtatcccagccacaagggaggctgaggcaggagaaccgcttgaacccgggaggcggaggttgcagtgagctgagatgtcgccactgcaccctaggctgggcgccagagcaagactctgtctcaaaaataaataaataaataaactctgtctcaaaaataaataaataaaataaaataaatagagcagagacctcaaatattcacttgcagacacagataaaggctagcacaggtgttttccaatgaagacacaggcagatgagaggatgcacacattctacctgtactttttctttttttttttttaaattgagatagagtctgtgtcacccaggctggaatgcagtgatgcaatctgagctcactgcaacctccacctccccggttcaagtgattgtcctgcttcagactctggagtagctgagattacagattctcctgcttcagactcctgagtagcccagatcacgggcctccaccactatgcttgactaataatttttcttttttttttttgagatggagtatcgctctgtcgcccagactggagggcagtggcttgatctcagctcactgcaacgtcagcttcctgggttcaagcaattctcctgcatcagccttccaagtagctgggattaaaggcatgcaccaccatgcccagctaatttttgtatttattagtagagacagggtttcactatgctgggcagactagtcttgaactcctgacctcaagtgatccacttgcctcggcctcccaaagtgctgggattacaagtgtgagccactgtgcctggccactaatttttgtattttttagtagagacagggttccatcgtgttggccaggctggtcttgaactccttacctcaagtgatccgcccacctcggcctcccaaggttctgggattacaggtgtgagccacagcggttggcctagcctgcactgtcttaagggcctgttgggcaggggagttcaggttctctcgtctctccagattgatcttcacacatttgctaagtctcgtatcgtccctgagcttgggagtcagggagcgctctgacctaagccctcctgactttggggtcaccatctttccccagcctctatgggcacactccctgaattatctgtggcttgagtggagcaagcaggggatgggatgaggggtggcgggggagttcccctcatccacttcagccttccagtctgctcccccttcctgtacctctctcttccagaaccccaggccaagcaccagagaaggcctgggagtgagcaaggtgcccatgttgcttctgtggatcatcctcctgcttgtacagccctgggagggcctaggaacgcccgcccctctgctggagggagcctttttacttccttgcagccctctgaagataccagcgagtggggagcagagccagcagacggggtgggccaattgatggggcgtggtagggggtgtgtttgaggaagggtcagcctctttccctccaagatctgattctcctccttacccctgaactgtaggaaaacaaaaatgatgacaccctctacaccccagatgatctctcagtgagtattgcattcgcttctttctgcagttgcaggttttgagagaattcagtggtctccatgtgtgagggctgctgtgtgaccatatgaatatgttgcggggaggaagtagtgggactatctcctgacccagcccctagccttgacagatatattttgctcactgctgtctccaacacctagaatagggaggtatataataacaaatgatgatgatgactacagctgcatgtaaatagtgtttactctgtgccaggtattggtttaaatgctttaagtatgttagcttatttactctgtacaccaatcctataagatagataggaccaccatgtatggatgtgaatgttgtacactgcacaaggatcccacatctacaaagacagtactatattcacaggctggatattgtagatttgcatatttgccaacttgcggcagatggcagtaaagtatcttgttctaataaaatcaagacttagaaggtagaaggaacttaaggaaggtctttttattttcttttttttgagacagggtcttgctctgtcccctacgctggagtgcagtggcacaatcacagctcactgcagtcttgaccttttaggctcaagcaatcctcccacctcagcctccagagtagctgggaccacatacacgtgacaccacaaatagctaatggctaattttttttttttttttttgagacacagtgttgctctgttgccagctggagtgcagtggcgtgatctctgctcactgcaacctctgcgtcctgggttgaagcaattcttctgcctcagcctcccgagtagctgggactacaggcatgtgccaccatgcccagctaatttttgtatttttagtagagacagggtttcaccatgttggccaggatgttctcgatctcttgacctcgtgatccacctgcctcaacctcccaaagtgctgggattacaggcgtgagccaccgtgcccgacctttttttttttttttttttttttgtagatatggggtgtcgctgtgttgcccaggctggttttggacacctgggctcaagtgatcttcctgccttggcctctcaaagagctgggattacaggcatgagccactgtgcccagctgagtgtctttttctagcttgcacataagtacagcatgggatagtgtcaggccttacggttgggattatccagagccctatttacagatgaggaaactgaggcccagagaactgaaggggtttgttccaggacacagataagaaatcttgggagtggggacttggactcatgcccttacccatagataccaggtcactttgtccctactgtgtgtcctgctgagactctaggctgctccaggttggagctgtctgtgattgggtttgaggagggaccatctatgggaactgctgtgttccagctacagtacctgctggatctcctggggtcccggctgtgggtggccagccagggcccttgcctgtcctgtgaaggacatccccagagacctgtccccctcttggagttactacagggagcttgtgcttggcaccctaccacagcctgagctttggaggacatgggctcccaggtacacccagagaggctgggtagagagagggagggaatagtcttcagctccaactgccaaaccctaagccttttcttccctctaggccagaggaccccacctggagccctagtagccaaggggaagagttaagaaggaggaaagtaaggtgcgatctgaagtctctgacctcttgggcagggagttggataaattgccccacctgcccccattctcaccctcctttagatactcttctctcttcttccaggaagggacagagaagtgcacaggtattctctaacctcatccctataccttgagaacagggagggtcctgtggttcacatccctacatccctggctacaaaaaattaccacttgaagaactttcttttcttttcttttctgtttttgaggcagagtctcactctgttgcccaggctagagtgcagtggcatggtctcagctcgctgcaacctccacctcctgggttcaagtaattctcctgcctcagcctcctgagtaactgggattacaggcacgcgccactacacctgactaatttttgtatttttagtagagatggggtttcacaatgttggtcacgctggtctcgaacgcctgaccttgtgatctgcccacctcagcctcccaaactgctgggattacaggcgtgagccaccgtgcccagcccaccacttggagaactttcaagtaatactgatggccagaccccagcccagataatttgataattggtctctggtgaagcctgagcatctatattatttttattattatttagagacagggtttcactatgctgcacaggctgtaacttggcatctgcccatatatttttttgagacagggtctcactctgtcacccaggctggagtgcagtggcatgatcaaaactcattgcaggctcgatctttcaggctcaagtgactctcccacctcagtcccccaagtagctagcgctataggcgcatgccaccacactcagctaatttttgtattttttgtagagatggggttaccctttattgcccaggctaatcttgaactcctggctcaagcgatactccccccttggcctcccaaagtgctgggattataggcatgagccaccacacctgacattttttttttttttttgagacagagtctccctttgtcacccaggctggagtgcaccggctggtggactggatggccacatttccatcaccccaaagcattccttctctctcttcccagtcaatttccacctccctctccagccccagacatccactaatctgcattgtctgtataggttggttttgcttgctctggagtttcatatgaatggaatcatgctggacatctcctgatgtctggcttctttcactcagcataatgttttggagattcagtcatgggtgtattggtagttgttactattctgttgcatggatggatgtaccaaaatttgtttttcttttgagacgagtctcactctgttgcccaggctggagtgcagtggtgcgatctctgctcactgcaaccttcacctccctggttcaagtgattctcctgcctcagcctcccaagtagctgggattacaggcgtgcgccaccacacctggctattttttttttttttttttttgtatttttagtagagatggggtttcaccatattggccaggctggtcttgaactcctgacttcgtgatccgcctgccttggccttccaaagtgctgggattacaggcgtgagtcactgcgcccggccctaatttttgtgtttccagtttagggctattatgcaactctttctttctaaaatattctcaagtattctgatgtgctaccagagttgagttcagaaccacggatccaccaaggaagaaacttccatggctggggaaatgactgtgccctcttttttctgcagggaatggctttctgcagcagtgtctgtagcgatttaatatgtagaatcctattttcttgttgtttttttttttgagacggagtcttgctcttttgtcacagcaacctccacctctcaagttcaagagattctcctgccacagcctcccgagtagctgggattacgggtgtgcgccactacgccacctggctaatttttgtattttttagtagagacagggttttaccatgttggccaggctggtcttgaactcctgacctcaggtgatccgcctgccttggcctcccaaagtgctgggattacaggcgtgagccaccgcgcccggtggagaatcctttctttttttgagatggagtctagctctgttgcccaggctggagtgcagtagcacgatctcggctcactgcaagctcggcctcccgggttcacgccattctcctgcctcagccttacgtgtagctgggactacaggcgcccgccaccacgcccagctaatttttttttgtatttttagtagagatggggtttcaccgtgttagccaggatggtctcggtctcctgacctcgtgatccacccgcctcggcctcccaaagtgctgggattacagacgtgagccaccgcgcccggcccaggtgtgtcatacttatgtgagaaattttaccaatgtgtcctgaggcttcttttttttttttttttttttgagactgagtctcactctcgcccaggctggagtgcagtggcgcgatctcggctcactgcaagctccgcctcctgggttcacgccattctcctgcctcagcctcccgagtagctagaatcacaggcacatgccaccacgcccggctaatttttttgtatttttagtagagacggggtttcaccatgttggccagactggtttcgaactcctgacctcaggcaatctgcccgccccggcctcccaatgtgttgggattacaggcatgagccaccgcgactgacatagacttctgatttttaaaatttcccctatcaggttaatttttcaatttttaaaaatttaagttttaatttttttttttttttttttttagagacagggtctctattacccagtctggagtgcagtggtgcaatcatagctcactgaagcctcaacatgggttcaagtgatcctcccaccttagcctttggagtagcagggaccacaggcacacgccaccacaccacattaaaaaaaacacaaaaattggatacatggggtctcaatttgttgcccatgctagtctcaaatacctggcctcaggtgatcctcccgcctcagcctcccaaagcgctgggattacaggcgaaggttcatttttcatctctccattacacctgtccactctgccatcactcgtcagccgtcattactaatagataaattcgcctttaaatgaacttaggaagcctggaaagaaaaatagggacttgggccgggcgcggcaggttatgcctgtgatctcagcactttggcaggacgaggccggaggatggctttttagtttgagttagaggagtttgagaccaggccgggcaacagcccgactctaccaaaaaaaaaaaaaaagtacaaaaagaaagaaaaagaaggaaaaaccagggcttcacggtcactcagacttggcgaggaggcttgggtctgccgctttccactgagtttttctgagcttcagcgttctctccaaaacggggatacggatctcctggggatgctttagagggcctaggagataaagccttgtttcttttataatttgctattcgctgatttcgccgcctcctcgcagcttggcctaccgcgctagtgttccggactaacgaacaaacggctcactaaattcaaacatgagtttcagcctggtcgccgagccggcgggtagaaaaaacctttcccctcctaaccctccgcagatgtcggccccgcactccgcccaggccagccctgcctctctcaagatggcgacctggaagtgcgtcgcccgtgccagccccggaaatctcgtgttaggcgaggtcaacgggtaggttctcgcgagaggacccgtcagccccagtcaggcgtcgtgcgaacagcagctggtaccgaaggcggaggtggagcccgagaggtaagtgcgtgtgcagaggtggcagttccgggcgccggggaggtgtagagaacagattcggaaactggggaggtctagcatgtggcgtaggagggggtcctcactccgcttcgcgattgccaaaacgagcctgccggaagcgccctaaggggttttcttctcccagggaaccagcggggaaactgaggctcggggtggagcgcaggattgtgggacgcgccaaggctgctgtctttcccagcagcagcggaagatgtcggacagcgaggacagcaacttttccgaggaggaggacagcgagcgcagcagtgacggcgaggaggccgaggtctgtggctggggcgctgggggagacattgcgtctggggacaggactccgggcagaaaggcccctgtgggaggctcgaggggttcacagcgggctctggcttctgggaactcccagattgtctcaagagatagagaattaggcaagtcgaagtcaagcaaagggacaggttctggaggccagaaatgggtcaggtccagtgagataacaggtgatgttttgaaagtttactctgtgtgcatatagtaagcacttagcattagtttttttttttagttatgtctagtcattccataactatatttgtagtgcctactatgtaccaggcgcaattctttgctcttagggtacaccagtaaacaaaaagattttaaaaatgtctgccttcgggaatgtaaataaatatagccaaggaataaactatatagtaagctggaaggtactctggagaaaagaacagaaaaggggaatggagagtcctggttgctcttgaaatagggtcatcagcatgagtctgaggggtgacatttgagcaaaaacttgttggaggtgagggagtgagtcgtggttagctggaagtgtagtgttccagtgagggggaccagcaggtgcagagatgggagtgtgtccgccgtgttcagggattaacgaggatttgagaggccaagctgggaggatcacttgagcccagaagtttgagagcaatctcggtaacacaacgggaccctgtctctacaaaaatataaaaaccattggctgaggccgggcttggtggctcacacctgtaatctcagcactgtgggaggccaagacagtggatcacctgaggtcaggagttcaagaccagcctggtcaacatggtgaaacaccatttctactaaaaatacaaaaaaattagcttggcatggtggcgcccacctgtaatcccagctactcgggaggctgaagctgagaatcgcttgaaccagggaggtggagactgtggtgagctgagatcgcgccactgcactgcagcctgggcgacgagcaagactccgtcttataaaaatattagctgagcttggtggcacgcttctgtagtcccagctacttgggaggctgaggtgggaagattgcttgagccagaaggtgaaggtctagtgagctgtgatggtgccactgcactgcagcctgggtgacagagtgagactttgtctccccaccaccccctaaaaaaagggggtccactttggttggatcagagtgagtgcaacaaagaatttatgagagccaagtcatataggatcttgaaggctgtggtaaggaatttggtcttaactgagtaaaatgaaaccacgaaaaagtttgagcaagtggaagatgtgatctaatgttttgaaaggatcactctggctttgggtctgttgtacctctgttccaggaaccaaaaaaccaacatttcctggggcatttctgatttcaaatgttcttttatttgccattatcttttttttttttttttttgagacagcatctcactaggttgcacaggttggagtgcagtggcatgatctcagcccactgcaacctcagcctcccgagtagctgggattacaggcatgcaccaccacatcaggctaatttctgtatttttagtagagacggggtttcactgtgttggccaggctggtcttgaactcctgacctcaggtgatccaccctccttggcctcccaaagtactgggattacaggcgtgagccactgcaccaagcccattatccaccttttaaacttatttttgttttatttgtttgttgaacaaatcagtgtttgcatctactactgtgttccacttacttctcaggtgtctggtaggaaatctttgcatttttggagttgacatttagtaggtagcaatcacaaaccagtaaacagatgacagggtgattatagatcccttgtttgatgcacagaaacttaaattggctgttaaattagttgccaatgcttgtgagggagatttaacataaagattaagatttctttttctggggaaatggaaggagctggcaccctgggacacagagttgttctgcagagcagccgtttgcttgatgagtggctgccctacttatacagctgggaattttctccagttcccaggatatgttagttgccatttgtcctcttgcttgccttgtggcagagtgaagaaaaggaaaagatttcatgtggctgtgttctggaaaacgtttggtagatggagagtgctgtgtgtttcgggtgacttgtcccagtcacttatgttgcctgcttatcctctgtggacatttgattgccaatctttattgtgacctttggagagtgcctggcttccaggcttgcagtgaagagttggagaaattgggatgctgtggtgggagagtgacagggagggccttttctctaagctgtagcactggattcttggtctctgattcatggcttggagacactgcttggtggttaaagtcaggtggaaatgagaccaagatccccagttccatttcctgtctgggacattctcgtttgcactgttactagtctcacttccccaacactacaccatacttgaccccccacccccgccgctggctcctcttcagttaccaggtgaggcaagagggcactgtgaggcctgtccccactgccagggacaggattggatggccttttcagacagccaaatgatgacatggtccttgaaggacagggttctgtggctagacaggtagggatggcaaataatgagctacttttgaggggagctgctggttcacccatcatggctccagtaacctgttcatttattcattcaacaaatgttctggctgggtgtggtggctcacgcctgtgatcccagcactttgggaggctgaggtgggtggatcacgaggtcaggagattgagaccatcctggctaacatggtgaaaccccgtctctactaaaaatacaaaaaattagcgtggtggtgggtgcctgtagtccctgctacttgggaggctgaggcaggagaatggcgtgaacgcaggagacagagcttgcagtgagcagagatcgcaccattgcactccagcctgggagacagagcgagactgcatctcaaaaaacaaaaaacaaaaaacaaatgttccttgacttggcatgttggggtcacagtctcccttacagagatctcagtctcaaggcagaggcagttttatagatacacagttactgcaggggatgttgaggacggtgagagcacatccaagccctgaggtgagcagagagtggtgggggcatcctccactgggagggaggagccaggtttggaaagaggcatctctgggacctgtcagaggggaactgatgacaaggttcctagaaatcagcctgtggtcctgtcatagtttgggttgttaaaatgtgcttcatcgtgggctagtcgagatttgtgttaagcaaatatttctgaagtcttctgtgcttggccttgggctgggtgatgttgggggacccagcagtgcctgagatggactgggccctactattgggaggctcacagtggtcagggctgtgatggagggagcccagagaattgtgagcatagaggatgtgcctgactctgcctgggggagagggggcggggatggctgcctggaggaggaaggttagtttggttttttttttttgtcttggtgtcttgctctgtcacccaggctggagtgcagtggcacgatctcagctcactgcagcctccacctcacggtcaagcagttctcctctctcagcttcctgagtagctgggattacagcggtgcgccaccacacctggctgatttttatatttttggtagagatggggtttcaccatgttggccagggtggtctcagaactcctgacctcaagtgatcgcctacctcggcctcccaaagtgctgggattacaggcatgagccaccacgctaagccttttttttttttttttgagacagggtctcactttgtcacccatgctggggtgcagtggtgtgatctcgactcactgcagcctcagcctcctgaggatcaagcaatcctcctgcttcagcctcccaatgaactgggacaacaagattttgccaccatgcctggttaagttttgtatttttggtagagacagggctttgtcagattgtccaggctggtgtcaaactcctgggctcaagtgatccttctaccttggcctcccaaagtgttgggattacaggtgtgagcccccatgcctagctaaggagggaatattttcgttgaagtgtgaatgggaggcacagttttttttttttggagatgaagtctcactctgtcgcccaggctggagtgtagtggcacaatcgcggctcactgcaacctcttccttctgggtttaagtgattctcctgcctcagcctcctgaatagctgggattacaggcgcatgccactgcgcccaggcccagaggggactttttatacagaaaaccagcatggatgatggccagcactgagagagtatggtccaagtagttgagtgcagctgaggcctagtgttggggaggcagtcctgaatggtggggaacggggagaggcagcaggcagagcatgtgcttctagttcaggctggctgaagctgagcaggggaacaaatggtcaggttcatgttttagattacagttttctaagactgtaccatatattctaggttggggatgatgaaaggtgcttttaggtggaataaggacaagaccttaagctacattgaatcatttagtgagaatatttccttttcagttgtgtgtcttatcttgattgggtcatgagaaagtttcatcttagtgctactgtgtcttgaacgcctctgggtgggagaacaggccttaggcttagagcctgcagcaggcagcagtatcttgctgggtcttaataacattgttttgcttttatctttatagttaccttgtgtttatgacaaaccttcaaaaagttttaaattttgaaacattgcataatataaaaatgtttttatttaagaaggtgagtagatttgaagaaaatacacattgagtattatctaaaatgcttgggacaagaagtgtttcagattttggatttttttttttttgattttgtaatatttgctgtggagcgttccctaatctgaaaatccagaatgctccagtgaacatttactttgagcatgacctttttttttttttttttttgagacagagtcttgctgtgtcgcctaggctggagtgcagtggtgcgatcttggctcactgcaacctgtgcctcccaggttcaaacaatcctcctgcctcagcctcccaagtagttgggactacaggcgtgccaccatgcctggctaggtttttttttttttgtatttttagtagagatggggtttcactatgttggccaggctggtcttgaactcctgacctcaggtgatccgcgcgagccaccgcgcccagcctgagcatgacctttgagcattatgtcagtgctgaaaaagtttcagattttgaagcctttcagatttcagttttttgtttgtttgtttttttgacagtgtcttggtccattggccaggctggagtgcagtggtacaatctcggctgagtgcaaccttcacctcccagtttcaagcgattctcctacctcagcctcctgagtagctgggagtacaggtgcccaccaccgtgctgggctagcttttgtatttttagtaaagacggggtttcaccacattggctaggcgggtcttgtactcctgatgtcaggtgatccacccgctttggcctcctaaagtgttgggattacaggcatgagccactgcacctgaccagatttcagatttttggattagggatgttcaacctgtattaggtaaatggattgtagtaatgacatggaagaagtcgtgaagttcatgagttaaagactgaagtttggtatgcatccattaatgttgtttctggtatggaaagagggattagaggccaggagagtagggaggaggctggggtaaggatccaggtgttagagggcagtgtcctggcctaggctcagatatatggggctgggggaaaaggatgggttggagaaatgatgtttacaggcagaaaggatgaggatttggtgcctgtcggtaattggaggaggccatcacaggtctaggggaagacactgaggtcagtttgggacacagtgagtatgaaagggctcagaggccatctaggggaggcatccaggatgctgctggtgcatggaggtcttgagttctggaaaaaagtgggactctatagacagatgaggacacgtgtcatctctagagacaggaactgaggtcatggaaagtaaaatggacagggagagagggcatggagggagaacaaagtggccctggactgagccctggtaattgatgtcagatttgaaggggttaacagtaagaggagcttgaagaggagctggtggagttttgagaaaaaccaggagagcatgatacggcagaagccaagagaggagcatttctccagggagggcatggttggggtgccagatgctgctgggatggtagggaatacagaatggccacagaattagcaacaggggtggccagtgatcttcgtgagcagtgtggactagaaacagagatgggagtcactgtcacagagatgtccaccaccgccaagggagaggacgagatggccttggggagttgtagaatgggaagagatgggccaggtgctgtggctcacacctgtaatcccagcattttcggaggcagaggcggatggatcacctgaggtcaagagttcgagaccagcctggccaacatggtgaagccacgtgtctactaaaaaaatacaaaaattagccaggtgtggtggcgcacacctgtaatctcagctactcaggaggctgaggcaagagaattgcttgaacccaggaggtggaggttgcagtgagccaagattctgccatggcactctagcctgggagacagagtgggactctgtctcaaaaaaaaaaaaaaaaagagagagaaagaaatgaggcccaaggaccaagcttcatcaagctattatagttaaagactcggtggaaagtgagcaagaggtctagtgcagggagaagcccgggtcaactcccagggttgcttgggtggctggggagatggcagtgctgtcgctgagataggatggtaaccagagaggccaggctagagtgaaagggatatatgcagagcaaagtgggctatgattggccaggccaatctgaggtcagatttagggtgaggaacttggtttttggatttttggggtagcagaattctggtgctacaaccctgcctgacccctgtaggtagacgaagagcggcggagtgcagcgggcagtgagaaagaagaagagcctgaggacgaagaggaggaggaagaggaggaggaatacgatgaggaagaggaggaagaagatgatgaccgaccccccaagaaaccccgccatggaggcttcattctggacgaggctggtatgtcatagtgcttggccagtgccgagcagaggctgagcttctacttttagttccatttctttttctttttttgaggcggagtctcgctctgtcgcccaggctggagtgcagtagcatgaacttggctcactgcaagttcatgccattctcctgcctcagcctcctgaatagctgggactacaggcgcccgccaccacgcccggctaattttttctattttttagtggagacggggtttcaccttgttagccagggtggtctcaatctcctgacctcgtgatctgcccgccttggcctcccaaaatgctgggattacaggcgtgaaggaccaaagttcttaacttttctcgtgctacggccccttctgtagtctggtgaaaccctgttcccttctcagaatcatcttctgaaatgcataaaacaaaatacataggattccaaagaggacaatttattgaagtacagttatcagaatatttaaaaagaacattttggtgcatatgtttctttgttaacatatttaggtaataagactttgtaggtagtctgagaatctaattttcaagtagcagtgagtgtaaatgctgccttgagatacctatagctgtaatgtgctgtgaaagagccagtgacacagctaacattgtgtggtttgttgccattgtatgtaattgatgtaaatgctaaatttcaattccaggttactgaaaataggagctgtagttttttcatcgaacacagaccaccccagatgaaaaatctctgttctacgtgttaaatccctgttagtcaaattgctaggtaaaggtggtgcattttgttgttgtcgttgtttttttttttttttttgagacggagtctcgctcaggctggagtgcagtggtgcgatggctcactgcaacctctccctcctgggttcaactgtttctcctgcctcagcctcctgagtagctgggactacgggcacgtgccaccatgcctggctaattttttatatttttagtagagacagggtttcactgtgttaggatggtctcgaactcctgaccttgtgatccgcccgccctggcctcccaaagtgctgagattacgggcgtgagccaccatgcctggccgcactttttttaaaaaaagattttttatatttacggccaaatatcagttcctaaaaagataagactagttcatacttccatgatgataatgaatgtgcatgttttcccttacctatgggaagaggggttacttagaacacatcctgcctctgttttcctgggactgttttacctgagaagaaaagtagtttattgtcaaagggacaggaggtgctctggatgttcttggagagcaagagaatggataccatgctgggtaaaagctgtgggttcccagggacacccatatgttggtggtggaagtgttggtgggcactgcctgtgtggaaggctgtgtggcagtgcctgttagcatttaacatgcaggaaccctttgaccaagcagttcctctttagaatttactttatggttaaacttgcatgagtgcatgaagacctgagaacaaagatgcttgttgtagtcctgttcgcagttgcaaaagtttggtgacctaaatgtttattgatgattagggcctggttaaacaaattatgggccatatagtatatgaggcatgtgctgctgtgggagagctctgagttagtagtagttttgagaaaaagaaaggtacagaacggtgtgttaaaaaaattacgtgggggctgggcgtggtggctcatgcttgtaatcccagcactttaggaggctgaggcgggtggatcatctgaggttaggagttcgagaccagcctggccaagatggcgaaaccctgtctctactaaaaatacaaaaattagctgggcgtggtggcgggcgcctgtaatcccagctacttgggaggctgaggcaggagaattgcttgaacccgggaggtggaggttgcagtgagccgagattgctgcactctagcttgggtgacagagcaagactcggtctaaacaaaaaaaattacatggggggaacatagtggtggcggggtggattacatgcatttcttttcttttcttctttttttttttttgagatggagtttcgctttttcacccaggctggggtgcagtggtgcaatctcagctcactgcaacctccaccttctggtttcaagtgcttctcctgcctcagcttcccgagtagctgggattacaggtgcctgccactacgcccagctaatttttgtatttttagtagagacagggtttcaccatgttggccaggctggtctcgaactcctgacctcatgatccacccaccttggcctcccaaagtactgggattacaggcgtgaaccactgcgccccgcctcttctttttttttttttttttttttttaagacggagtttctcttgcccaccctggagtgcagtggtgtgatctcggctcactgcaacctctgcctcccggattcaagggattctcctgtctcagcttcccgagtagctgggattataggcgtgtgccactaatttttgtgtttttagtagagacggggtttcaccatgttggccaggctggtctcgaactcctgacctcaggtggtccacccatctcggcctcccaaagtgcggggattataagcatgagccattgtgcccagaccttttttttttcttttttctttttttttttaaagacaggatctcactccgtttcctaggctggagttcagtggcatgatcatggctcactgcagcctctacctcccaggtccaagtgatcctctcacctcagcctcctgagtagctgggaccacaggtgtgcatcaccaggcctgactagactgtttttttttgttgttgttgttgttgttgttgtttttgagacggagtttccctctgttgcccaggctggagtgcagtggtgtgatcttggctcactgcaacctccacctcccgggttcaagcaattctctgcctcagcctcccgagtagctgggattacaggcgcccaccaccatacctgactaattttttgtatttttagtagagacgggggtttcaccatgttggccaggctgatcatgagctcctgtcctcatgatccacccgcctcggcctcccaaagtgctgggattacaggcatgagccaccgtgcccaaccctaactaattttttaagtttttggatttaggaggtctcactatgttgcccaggccggtttcaaactcctgggctcaagtgatcttcccacttcggcctcccaaagtgttgagattacaggtgtgagccaccacgtccagccttacatggatttcatatatgtacacagatatctctaggcaagaaactagtcacggagttgcctttgggagaggttactgagattctaggggttagaaatgtgagggagacttaattgatacttacatcctctatggacattggagtttttcattatgtgcatgtattacgtttttagtgtaatgtttgatacctgcaaagcagtacatccaacatggtaaagagattaagtacatggaccatggagccagactgcctctctcagatcccagctgagtctgtgggcaagttccttaatctctctgggtctcagagcctttgctgtaaaataggaacaacgatagtgcctccctcggggttgccaggaagatcagtgaggaacctgtgtcaggtactcagaacagggcagggtgtatagtatgctctcagcattagctgttataaatgtacaagaatcataaaaccaacagaccatgaaccatcttttaaaaaactatttattgatcattttctgatagttgggagggaacttttctttttgcttactttgatcttagttttttaaaagggatttgggagtggagtaaggagaggggatgacttttagagttagttggagctgtatgtccccctcgatcctgatgcgtgcaccagctctgtggcacggccccagacgagtgcctccctgttggagcctcagtgtcctgctctgtgcggtggggatttgtagtgcacatctcccagaggagatgcttcgtgtcctgggagctgttatgaggtcacctttgccacttaccacttggcctttccgttttagatgttgacgatgagtatgaggacgaggaccagtgggaggatggagcagaggacattctagagaaaggtgtgtgtgagccctgcctccacaagactactgggaagagggtggctgagagggtcttcagagcccattcccccgacccccgcatcccctgtacaccccaactcccaccgtcctcaccttgcttctttctgtccttcccagagagaccagctccctgctttttccttttaggcccatgagtggggggtggggccctggggtggggatgttgtggggagaggactctgggatcccagggcccagtgaatcccttctggggttgtagggtgggcgagctctgtcccaagataccccccacttcctgggccagtgcccccctttccccgttattttccgttctgtgcgcctcatacatttcggcttctccccaaccacctggtgcctggcctttacttttggttttcaacctttctgtgtccctcccttcccctcccccaacccattggttgattttgctgctataatttggctcatactttgtctgccctcgcccaccaccaccaccaccaccaccaccaccaccaccaccaccacctcctcttcctccaagtagaagagattgaaggtaagaatatgaaaagtgtgattccctgaccttcctcccatatcctgacatttcctccttcctgaggcacctgccctcaccggtagcctccccaccagccccggtctggccctgagggctctgacccatgtaggatccagagtcagggagttctggggccaggtataccccagttgttgacctgggaaagcacggatgtgtctgtctgggactgagcatttgtgggtggtagcgatgtgtggggtggggtgcagtccagggtgtgcctggactttgagatgggaacagctggaagccccccaacttgctgggccccatccccagtctttttgacaagaagcaggatgctgagtaggacagagtaggggatgaggggttgggatttcctctgtgagatgtcatcttcctgccccagggccaaaccctggccctcttagctgcacgctcctattttctccaggcccctgccctccacctgcccttgctcacgccctctgcccattatttttcagcctccaatatcgataatgttgtcctggatgaagatcgttctggggctcgccgcctgcaaaacctctggaggtgggcaaggaagggaaacgtggtgggattggctcctgtggggagatttgggagtaggtcagcccacctgctgtcctcaaccttcaattcgtgtttgcttccccactcgtgctccagggaccagcgagaagaagaactgggcgagtattacatgaagaaatacgccaagtcatctgtgggagagacgtaagggcatggtgggggcaggtgggggcagggagcaggtggtccctaagcgggaaggggcggggatctgacagagcttcaccccttcctgactgccctcctcccttcagggtgtatggaggatctgatgagctctcagacgacatcacccagcagcagctgctcccaggagtcaagtaagggggttgggatggtgggggccgtgctggggtgcgaatcttgtatggggtgatggtgcctagacaggtggctccctgaaataagtcagggcagagtcacacaggcagtgtggtggatggcaggggtagggagggcaaggtggcactttctctttcctcttgctcctgggtagaagcgtggggaagtcagtgagtgtgagggaacctggatgtgaaaccagaggaagggggtggccctgggggttcgtctgtttgttactgaagatccagcttcactgaaggccttccttttcctctgctgcttagggatcccaatctgtggactgtcaaatgtaaggtatgtgctctgatctcggggcttggaggaggtgggagaatgagggaggctgctttgtgggggagaagtgtctgtctgtcccgggtctccgtggcctgccagtcacttggtccttctgtctccatccctcactccacgttactgactggctatctcccacctccatcttcctggctgtccatccttctttctctctcctctcttggtcctactttatttttcttgctgctgtctccttccccctttcctgtgtcctttcctccatcctgtcatctctctcaaatctgcctctcatcttccagattggggaggaacgggccacggccatttccttgatgcgcaagttcattgcctaccagttcacagacacggtaagtcgggtagacaggcggcttggtggggagacatggcaacacccagagggaagaacattgtcaacttcaggggtaccaggtgcctctgttgtgagcagagctgcctgctgagtgagctgcttgagctggaataagaccactgcctagatggaagggctcttctcggcctagatggatatgttgtctttgttctctgcatttatggcagggtcttcccacccttgtagccctttggaagtcagccagctagcttcctgcaccttttcttcatgagagtgggtttgcctgttcaccagccctgttgggctggggtcacccacttcaccacatgccaggcagcaaatgctgcatccaaggcccaggtctttctttagactgacagagtttgagtcctgcccttgccacttcttagctgtgtgactctgatgcacctacttcccctctctgggccccttggttgcctctcagcatcattaggattaagtggcttttggctgggtgcagtggcattcacctgtaataccagcactctggaaggctgaggcaggcagatcacttgaggtcaggagtttgagaccagcctggccaacgtggtgaaaccccgtctctactaaaaatacaaaactcagctgggcgtggtggtgcacacctgtagtcccagctacttgggaagctgaggcagaatcacttgaacccaggaggcagaagttgcggtgagccgagatcgcatcactgcactccagtgtgacaaaaaaaaggattaggtggctttatgtccagctctcagctaggacttgttctgcagcttgcatttacttagcagagctgttgtcaaaggcttcattggcagtttgggaaccagggcaaacgctatgaagggtgctggctggtaactttctcagttaacatgatccctgctagggatcatgctttcacctgtccagccactgggtgtgacccagtgggaccaagtagacagttgtagggtttgcaaactatgcttttaaatgtgctcaaatgtcctcctcaaaggccggccatggtggctcatgcctgaatctccagcacttagggaggctgaggtgggtggatcacgaggttaggagttcgaaaccagccagtttgagaccagcctggccaacatggtgaaaccttgtccctaccaaaaatacaaaaatcagctgggcatggtggtgcttgactgtaatcccagctacttgggaggctgaggcaggagaatcacttgaatctaggaggcagaggttacagtgagccaagactgcgctattgcactccagcctgggcgacagagtgagactccgtctcggggtgggtagggggtggaatgtcttcctcattattatagtaataagtgtccctgcctgtcatgggtgagattgggatttgtggggtatgattccccaacagggaggttgaaaaggtaccttttggctaggtgtggtggctaatgtctgtaataccagtattttgggaggctgaggcaaaaggagttcgaggccagcctggacatcatagtgacatagtgacaactgatttctacaaagaaaataataataggccgggcgcggtggctcacgcctgtaatcccagcactttgggagactgaggcgtgtggatcacctgaggttaagagttcgagaccagcttcaccagcatggtgaaactccgtctctaccaaaaatacaaaagattagccaggggtggtggtgcatgtctataatcccagctacttgggaggctgagacaggagaattgcttgaacccaggagttggaggttgtagtgagccaagctcgtgccactgcactccagcctgggcaacagagcgagactgtctcaaaaaaaaaaaaaaaaaaataataataataataattaaaagaagtgtgctcaaatcctcctacatggtaccctggggtaaaattctagttacttcatttgagttatgtctctgattattatttttttttgagacggagtttcactcttgttgcccaggctggagtgcaatggtgtggtctcggctcactgcaacctctgcctcagcctcccgagtagctgggattataggcatccgccaccatgcccggctgatttttttgtatttttaatagagacggggtttcaccatgttggccagcctggtcttgaactcctggctcaagtgatccacccgccttggcctcccaaagtgctgggatggcagttctgagccactgtgcccagcctaaaatttaatttttttaaagtgtaaactgtggtggattttatatattgtagtgtattcataaccatcatcaccatctaattccaggacattttcattatcccaaaaataaaccgatacccattagtcatcactccccattcctccctcctcacagctcctggtaactatgaatctaccttctttctctgtggatttgactattggaactctgaatggttcatacaaagggaatcatacaatatgtcgcctttcgtgactgacttgcttcacttaatgttttcaagactcatccatattgtagcatatatcaagacttcatttttttgtttgtttttttgagatggagttttactcttcttgcccaggctagaatgtaatggtgcagtcttggcccactgcaaccactgcctcccaggctcaactgattctcctgtctcaatctcccaagtagctgggattacaggcacccgacaccacgcctggctaatttttgtgtttttagtagagatagggtttcagcatgttggccaggctggtctcgaactcctgacctcaggtgatcggcccacctcggcctcccaaagtgttgggattacaggcgtgagccactgtgcccagccttaattttcttttttttttttttttttgagacagagtctcgcaccgttgcccaggctggagtgcaatgatgcgatctcggctcaccgcaacctgcacctcccgggttcaagcgattctcctgcctcagcctcccaagtagctgggattacaggcacccaccaccatgcccagctaattttttttttttttttttttttggtatttttagtagagatggggtttcaccatgttggccaggctgaccttgaactcctgacctcagatgatccacccctcagcctcccaaagtgctgggattacaggcatgaacccactgcgcctggccaaccggccttaatttttgtatttttagtagaggcaaggtttcaccatgttggccaggctggtattgaactcccgacctcaagtgatcctcctgcctcggcctcccaaagtgctgggattacaggcatgagccaccgctcctggccttttttttcttttagttggtatttacagctatacatttacttctaagcatggcttttttcaaatctcataagttttggtatctaggagtgtgttgccatgtatttgtgaatttcctaagtatctttctgttggtttttaacttcattacatatggatggagaatatactttatatgattttagttcttttatgtttactgagacgtgttttatggcctaacctgtggtttattctggaaagtttaatatgcccttgagaagaaagtgcattctgctgttgttagatggagtgttcttttttcccatttccgcttaataagtggaaagtgaagacgaaatgttctgtctatagctggctattaggtttaggtggcttacagtgttgctcaagtgttctctttccttgttgatcttgggtctagctctatccatgattgaaagcagggtattgcagtcagtgattgttactgttgagttgtcagtttcttccttcattttcattagtttctgcttcatgtattttgaggctctgttagtttcatatacatttgtaattctatcttcctgatggattgacctttttattgttacaaaatgttttttgttgtctctggtagcaatttttgtcttaaagtatattttgtctgatgtaagcactcctttcttggttcttcttctagttgctttttttttttttttgagacggagttttgctcttattgcccagactggagtgcaatggtgcgatctcagcttaccgcaacctccacctcccgggttcaagcgactcttctgcctcagcctcccgtgtagctgggatgacaggcatgtgccaccacacccggctaatcttggatatttttagtagagacagggtttctccgtgttggtcaggctggtcttgaactcttgaccccaagtgatccacccgcctcggcctcccaaagtgctgggattacaagcatgagccaccgtgcccggctctagttgcttttttacacagaacatatgttggatagctttctatattagtacatacaggttaatctaatttttattttattttttatttttaagagacagggtttcactctgttgcccaggctggagtgcagtggtgcgatctcagctcactgcagcctcaacctcccgggctcaagcagtcctccctgctcagcctcctgagtagctgggactacaggcatgtgccatcacacccagctagtttttgtattctttaactgcaacattgtatttcatggtacattaagccataagttaactagttactgtttctggatatttttaaaatttttagtctggtttgtttgctgtgataaataattctgcagggaacacctttgtgtccatgtcattgtgccagtgtgtttctgtggaataaattcctagaagagggactgctgatgagtggcagtcatttctgttattagccgttgtgtctcactgtttcctccttccaccggctcaccctgcagcccctgcagatcaagtcagtagtggcaccagagcatgtgaagggctacatctacgtggaggcctacaagcagacccacgtgaagcaggccattgagggggtgggcaacctgcggcttggctactggaaccagcagatggtgcccatcaaggagatgacagacgtgctcaaagtggtgaaggaggtggccaacctgaaaccaaagtcctgggtccgcctcaagcggggcatctacaaggatgacattgctcaggtgcccggggcggggtggcatgggggtcagggtccctccattctgttctcccttcctttccttttgtccttcccaccctctttgtgctgcagagaatagaatcccactcagatgagttgaagcagagcctgggttttgtgagcacacaggaaacggttggctgtcttctgtgcacattcccaggcgtgttgagtaaaggtctgaaggatcggagggcgtgaggcatgtggagctcttggggaggagtgttgtaggcagcaggagtggcctgtgagataggatggcacagtcactggctacagcagggatggcgtgagatgagttagggagctcacgagggcctgcggcccattggagagctttggtgtttactggcgtaggatgggagggctgtaagggacacaggcagacttcaatgttaataagatttctctggtgactgtgttgagactagaccactggttctcaagccagggtgatgtttccccaggggacatttggtaacgtctggagacatttttggttatgtcagctggggagggggttgacgattatggcatctagcaggttaaagccagaaatgctagacacacacatcctccaatgcacaggatggctgcccacaacaaaaaattacctggcccaaaaagtcaatagtgccaaggctgagaaacccgggaatagcctggagggggccatgggcaagagcgtggagaccagggaggaggctgctgctgtagcacatcccacccagatggcagtgctggtgggataggaccaagaccctaatacacgttgagtgtctctaacctgaattcttgagaccacaggtgtttttcagatttcagattttttcagcttttggaatatttgcattatacttaccggttgagcatcccaaatctgaaaatccaagagtgagcatttccttcgagcatcatgttggtgctcacagggtttcctatttttgagcattttgggtttttggatttggaatgctgagactgcagtggaggaggggaagaggtcaggtattttgaaggcagagctgatggaatttgccaacgggtcgggtgtgggtgtaagagaaacaaaggagtcaagagtggctcccaggttgtgtgcctgagcagagggaagaatggagtgggaggcggcaggtttgggggaatcagcggtttggctgcggtcgtcctggatttgagggacctttagacatccaggtggagataccaagcaggcagtggctactcagtgccagagttgaggggacagacaagctagcgtgggacttttgggagtggtcagcagcctggtttcttccccaccatcctgcgtcccttctccttcctagcatctcctgacccttcttgtgtctggggtcagggaggagagtggggccctgctgaccttctgctcgccctgctcaggtggactacgtggagcccagccagaacaccatctccctgaagatgatcccacgcatcgactacgatcgcatcaaggcccgcatgagcttggtactcaggggaatctgtggcctgggggggagggagtgtgctcgatcccactggtggccaagccccctccctcacccttcccacccatgcccctttcctccatagaaagactggtttgccaaaaggaagaagtttaagcggcctccacagaggctgtttgatgctgagaagatcaggtgcgtgtccttggggactggctgggctgggtccccagggccggtgtgtagaatgtgccttttgcaggttcctccccaggggtggccccgccacaggtttagcctgtgaattggttagcttggcagtatagcctcaggcaagtcacttcacatccctgtgcctcagtttcttctgctataaagattgatgaggctgggcgcagcgggagggagcactttggaaggctaaggcaggaggcttgcttgaggcaaggagttcgagaccagcctgggcaacataatgagatcccatcttttaaaataataataataataaaaagaaaaaagttaaaaaaatatttaaaaagattgatgaggctgggcgtgatggctcacacctataatcccagcgctttgggaggccgaggcgggcggatcacttgaggtcaggagttcaagaccagcctggccaacatggtgaaaccttgtctctactaaaaatacaaaaattagccaagggttgtggtcagctcctgtaatccaagctacttgggaggctgaggcaggagaatcgcttaaacccacgaggcagaaattgcagtgagccgagatcgtgccactgcactccagcctgggtgacagagcgagactccgtctcaaaaaaaaagaaaacaacctctgcttcctcagattatagattatagtgagaattaaataaattagtatgcatatgtactcagaatgcccttggcacgtagtaagtgtgatccatggtgtgatatattgaaatgggattcatggactatgtcaggctttagaaagtctcctttcctgatctgcttatgcccacttgagatgggggggtatggagtgcctttccctcaggatgccccccagactccctagctgggtagagaattggagcagcccaggaatttcaacatcccagggccaactgggggctccggcagggagggcaggagaggaggacatggagaaacgagaggtgccagtgacactcttccctctggtcctgttctagaactaattgtgtgtgattcagccagtcaggttttccttcagataaaggaagagctgtggaatgcacctttgagtctgcacccaagggccttgctaatacttcacctgcctgagttcggacccatttataccactggtttcgactcacctgaacctctctttgcaaagaacaaaccctagtgctcccttaccccccagcaagccagctgaccaagtaccccagcatgcccagcagagcatgctggcccctctcccagattcaccatgggagaaggcgattgcatgagcgcaggaggaacttgacctgctcctccatgaaggaggctccttccccaccccggagactcggaacaggcactaagcggccgccactccacatttggggccgggagctgcaggcttgggagtcccacctgcctgcttttgaatcctgtcaagactgtggcttggcacccttgggcatgtgatgtgaccttcctgagcctgcattccctcacctggaaatgatgagcagttactgatgccacagatttggggaagagcctgtgaggtcatgagtgtgcaggccaggctgagcgctctgcgaatattcactggtatcattgtctgaaactgttattttgttcagctaatgtttactgcatactttctgtgtactgggcactattcttggtgaaatttagtgaatgttacatccctgaccttctggagctgacatgctagttagggggacaggtcaaacactagattgtcagatggtgatcggtgctcaaagataaatcagggaatgggtggaggagtgcagggaggtgggaggcgggcctttggggtttgtgagaagtcactgctgccaagagggtgtgtgctgggatgggatgggtcagtctgcctgtggtcctctccttctgttgccagctgagaagactgaggtacagcaagattttcttcttgactctcccttctaatcttctctcccccatcaaattccaggtccctggggggtgatgttgcctctgatggtgacttcctcatctttgaggggaaccgttacagccggaagggctttctgttcaagagcttcgccatgtctgctgtggtgagggtcccagaggggtgttggtaatgggggtggtgtgagtgttctcctgcaggtgatgccctgggctgtgggttatctggttctgtcccactcctcaagttaggagtgttccctaggagaattattcccctaggacccactcagcccactcagctgggctgttgcactgacctcggtccatttccttctcttcccctcaccgctgggggcttagatcacggagggtgtgaagccaacactctctgagctggaaaagtttgaggaccagccagagggcattgacctggaggtggtgactgagagcacaggtatttgatccccctctataacctgggccaaggagcaggggcggcccatggtggcaacccccgagtcagccctacgactgcccctgcagggaaggagcgggagcacaacttccaacctggggacaacgtggaggtctgtgagggtgagctcatcaacctgcagggcaagatcctcagcgtggatggcaacaagatcaccatcatgcccaagcatgaggacctcaaggtgggtgcccggtgttctcgggcaggggttggagtgttcaggcacatctgactgtatgtggctgtcgaggcggtggtgtgcctggtgacacctggtttccaggagggtaagttgaggcccttctagcattctcaggtgcctgagaggctctgtctgagtgcagctcagggtcggtgggcagcaggcctgcctggtggtgtctgtctctggagagtgacttggtctatcttttgtttctgaaaagcaagatatctgggtagtactgggttgagagtgtgattaaccaaggagtaatctgaggcttgactttgtttgcttagagcggggtgtgtgtttgtctgtgtctggtgtatgtctgaggggttgtgcaggcccagtgtgatgtgtggggtgaggctgtctccgggtggggctgaggagctgtccagtcgggggtcctgtgtctgaggggcaggctctctgtgtgggtataggtaggcatcgtgtgtcttgagggcgggctggggtaaaggttgtccaggttggtgtcctgtgtctggggtcagctgtttctggggcagtctgaggggtcgtccaggtggactaaggtagtctggggtgggtggtaagagcctgaagtggggtttttgagaacatgcgtagattctgaagacaggaggggcaggcaggttgtggtggtctcccttcacctgtttgttgtccccacacccaatcccccaggacatgttggagttcccagcccaggaacttagaaaatacttcaagatgggggaccacgtgaaggtgattgctggccgattcgagggcgacacaggcctcattgtgcgggtggaggagaatttcgttatcctgttctctgacctcaccatgcatgaggtaggtggatagaagggtcggggaagggtgcacgtgccaagaggagacccaggtaggcgagccacctggactgggcctcacccctttcaccatccctggcagctgaaggtgctcccccgggacctgcagctctgctcagagacagcatcaggtgtggatgttgggggccagcatgaatggggcgagctggtgcagctggatccccagactgtgggtgtcatcgtgcgactagaacgggagaccttccaggtgtgtgtgttgtgctctgtggcggggacttgcttttaggaggcttcctgtccctcaacccctcatcctgggaggtggcagagcccccagactgctctgggttgcagatctggctctgtcacttacatctgaatggctgatagtgggcacatggcaagtcattgatccctccccttgcctgttttcacaccctataaaatggaaacgagagcagcgtctactttgttcatagtgaatgattccctgaggttagatctgtaccctggtggctgttgctcgctcaaggatggagtgccacatgtgccctcctgcctttgctccttcctcatggatgtgggagtcatggagcacagtacttaggatcctggactccacatccacatcttggctttgttgctcctgtgctgtctgaccctgggctagtgactcaccctctctgagcctgagtttccctctgtaagatggaaatcatgacagaatccacctcagaggaagttttgaggcttcagtgaaatcttacggggcctgacacagaatgatggatgaacaatgttgctatcagccccttcttccatctctcaggtccctgttgcccaatcgggggtggagtctccttccaaagggtgttttagaatgactgggaacatttttggttgacccagtacctaaagggtggcactctgcctgcctgccccgcagccagggaattgagatgccttgtggagcttgggactgtctcccacaaggaaggattatcccactttagggaacccctgccccgtgtctccccttcccattctcacccccacagcctccctgctctccctctgtaggtgctgaacatgtacgggaaggtggtgactgtcagacatcaggctgtgacccggaagaaggacaaccgctttgctgtggccttggactcagagcagaacaacatccatgtgaaagacatcgttaaggtcattgatggcccccactcagtgagtacaagttcctgcttttgagctgcatctgaaagaatttggttggttgggggtgagggggacatggtcaagagagtgacccttctctccccggctagggccgagaaggggagattcgccatctcttccgaagcttcgccttcctacattgcaagaaactggtggagaacgggggcatgtttgtctgcaagacccgccacctggtgctggctgggggctcaaaggtgaggtgggcatggcaggaccctgtgcgttgggtacctggctcagctctccaagcctcctctggccccagaagtgataagattgggcttgtgagggattaggagagcagtgtcattgtcaggtccttggcaaagagtgagaaggtttatttgggattctgagctgttcaccaagttattttaagttatttattcatttcattttactgagcacctgttaggtgccagacactggagaaccagtggtgaacaagacaaaaatactctgctctcacagagctgatactctagaggtggacagacagataaacccatcgtacagcttgaggtgatagcaagcgctgtgaagaaaacagaatgggctcaggagacagggagtgaccagggctgctgttttagacagaggagggtaaaaaaggcctcagtgggaggcagtattggagcagagacctgaatgaagggatggagagtgagcattttgggggaacagcaagtgcaaaggccctgaggtggggcttgtaggaaagtgtgcaggaccagctgtcacagaggaattcaggcctggggtgtgggtggctgggtggtctcctcagggccctgcacgtgggatgatgagttcctgtggtttgtggttcccccatcccctgcctgccagttcactccttgcttctatcctagccccgtgatgtgaccaacttcaccgtgggtggctttgcgcctatgagtccccggatcagcagccccatgcaccccagtgctggaggtgagaggggttcagggtcaggggatgtggtgggtagaaggggctggaaggaacttggttgttcagcctacactcactgagtgcctgtgctgggctgggcactgctattaggggttcaccacccacaggagggtagacgccacagtgacagcccagaatggtcagggcttccataggaaagccatggggcaggggtgggcagaggaggctcttaacccaagtagggaggagtcaagcaagtgaaggggacgttctgatggtgcccttgctgtgggcacagccgtgggggaccagtgacattctccccaatccccaggtcagcgtggcggctttggtagcccaggtggcggcagtggtggcatgagcaggggccggggccggagggacaacgaactcatcggccagaccgtgcgcatctcccaggggccctacaaaggtgacctgcgaggcctgtggaggcctggggaggggcatggtgaaggagagcctgcccagcctgacctcctgtccccctgcaggctacatcggtgtggtgaaagatgccacagagtccacggcccgtgtggagctgcactccacctgccagaccatctctgtggaccgtcagcggctcaccacggtgtacgggcggggcctggggagggccagggtggggcttgctaggcagtgagaggggtctgctcaccccatttgttctctgcgtccccaggggctcacggcgcccgggcggcatgacctcgacctatgggaggacgcccatgtatggctcccagacgcccatgtatggctctggctcccgaacacccatgtacggctcacagacacccctccaggatggtgagtgcccgcaggggacagggaagaggggctagggggacctagagaagggacaggacagacacactcatttcccccattccaggtagccgcaccccacactacggctcacagacgcccctgcatgatggcagccgcactcctgcccagagtggggcctgggaccccaacaaccccaacacgccgtcacggtgagtccagggttccccaggttctggtgtgtgctggtgtgtgtgagggatgatgctgggtgtctggggcattggaggggtttgtggggcccacccagcattctctgctcctagcctcaggctggtccctttgaaggaggaggcatagcatggcggggcgggggcaaagcggcctcctctccatccccaacctcagtagtgattgtggttacccttgggcctggagaaagactgcctgggtggagtgaccttgggagggcaccctcatctctgtcaaccacagtgtcagctgtggaagggaaataacatcaggagtgcctctggatggggctcccgtgagaatgaaattgcttcagttgggggtctggtgtagggtgctgttctggaagcatccatcgcattatcaccacagtcgctgtcaacagacttttctcccaacagggctgaggaagaatatgagtatgctttcgatgatgagcccaccccgtccccgcaggcctatgggggaacccccaatccccaaacacctggctacccagacccctcgtccccacaggtcaacccacaatacaacccgcagacgccagggacgccggccatgtgagtccactggggcctgccctcgtctacccctgcccaaaccctcctactgccaccacctcttttcccctccctcctccaacaaatgcccccttctctcctgtctctgcaggtacaacacagaccagttctctccctatgctgccccctccccacaaggttcctaccagcccagccccagcccccagagctaccaccaggtggcgccaagcccagcaggctaccagaatacccactccccagccagctaccaccctacaccgtcgcccatggcctatcaggtaatggtctgcctgcctgccctgaagggtggtgggctagggtgactttgggcatatagggtcggccaggccagatgactattcccaatgacacttcctctttcccctgcaggctagccccagcccgagccccgttggctacagtcctatgacacctggagctccctcccctggtggctacaacccacacacgccaggctcaggcatcgagcagaactccagcgactgggtaaccactgacattcaggtgaaggtgcgggacacctacctggatacacaggtggtgggacagacaggtgtcatccgcagtgtcacggtacgtggggcccagggtggtgggtgagcaggcatcctctccttggtaccccctaaactggagacagacctgtccccagatggtgacagcccagagtgggcagagctgggattgaggaagcctagagggcaaggggagctatgtgaacccaaaggaggcatcttacctgatttagcggggaatcagggagggctgcctggggaaggagaaatctgagccaagacctgacaaatgaataggagtaagctaaggaaagtgactggggtgagtgagttccaaatggagggaactgcatgtgcagaggcctggaggtgaggggaacctgggcacattccaggagctgaagggtttgttgtggctggaacataaagagccaaagggggccaagcagtgcttcacacctgtaatcccagcactctgggaggccgaggtgggcagatcacctgaggtcaggagttcaagaccagcctggtcaacgtggtgaaaccctgtctctactaaaaatacaaaaaaaaaaaaaaaaaaaaaaaaagctgggcatagtggcgcatgcctgtaatcccagctacttgggaggctgaggcaggagaatcgcttgaacccaggaggtggaggttgtggtgagccgagatcgtgccactgcgccccagtctgggtgacagagcaagactcctcaaaaaaaaaaaaatggtgagtgatgaggccagagagttggctggggccctgtcatgcaccagcctggaggacctagactgtccagagggcgccggagagccatgaaggaatctaagcaggagaggggtgggagcagatctgtggtatggaattctccatcagtgatggattgggggtggggagactgggctgggaccccagggggaggttgggctgcactggggcagggctgtggggaagaggcaggaggcaggtgggagagaccctcacgggctgaatggccaggcctcagagctaggggcttgttggtgagggaggtgaccaagatgaggtccagagctctggtggggcctgcagaccatggggcggtccctgagaccaggtccaggaagaggagcaggtgtggggaagacgctgaggccagtttgggacatgaagagtcaagaagcagtctcctttttgcctgttagcttcattctgatgcttcccttgctgattgggtcaccctgtccaccctgacatgcaccacaggccccaggccttggaaccaggcccagccttggcctttcctgcccccatttcaccttgagttctcagaatgagccctgagcctgtgtcccctggagtatgggcctcagtcccatgttgggagcaggacaggctgaccaggctgtccccatcctccaggggggcatgtgctctgtgtacctgaaggacagtgagaaggttgtcagcatttccagtgagcacctggagcctatcacccccaccaagaacaacaaggtaagggcagggggcaaggagataagatggggccgttgggtgctgacatggaccctgaccatattccccccacccccaggtgaaagtgatcctgggcgaggatcgggaagccacgggcgtcctactgagcattgatggtgaggatggcattgtccgtatggaccttgatgagcagctcaagatcctcaacctccgcttcctggggaagctcctggaagcctgaagcaggcagggccggtggacttcgtcggatgaagagtgatcctccttccttccctggcccttggctgtgacacaagatcctcctgcagggctaggcggattgttctggatttccttttgtttttccttttagttttccatcttttccctccctggtgctcattggaatctgagtagagtctgggggagggtccccaccttcctgtacctcctccccacagcttgcttttgttgtaccgtctttcaataaaaagaagctgtttggtctaaaagtgcgtgtgtgtgtgtgtgtgtgtgtgtgtgtgtgtgtgtgtgtgtgtatgccgtgggaatgagggtgttgtttttaagtggggtcatttgcagaccccacttccttgctttgtggttggggcaaataactggaccctacctaaatctgttttcccatctagataatagtgatagtgcctgccccagagagctcttgaggggagtgtgtatgagaagacgtcggaaggagatgatcagagtagagcttgtcatgtgattgatgacattatatcttattcaggcatgaattatgctaagtgaaaatcacagtatcccccaggaaacctaaattcctcctgtggtgcaggatacagtgcttgatggtcctttttctttgttttctctttatttttatttttttgagatggagtcttgctttctcaccaggctggagtgcagtggcacgatcttggctcactgcaacctccgcctcccgggttcaagcgattctcctgcatcagcctccccagtagctgagattacaggcgtgcaccaccacacccagcgaatttttttgtattttagtagagacagggtttcaccatgttgaccaggatggtcttgatctcttgacctcgtgatccgcccaccttggcctcccaaagtgttgggattacaggcgtgagccaccgcacctggccttttttttttttttcctcccctgagacagagtctctctctgtcatctaggctgaagttcagaggtatgatctcggctcactgcaacctgtacctcctgggttcaagcaattctcctgtctcagcctcctgagtagctgggattacaggcgtgagccaccacgcctggctattattatttttttttttttgtacttttaggagagacgggtttcaccatgttggccgggctggtcttgaactcctgacctcgtgatccgcccgcctcggcctcccaaagtgctggtattacaggcgtgagtcactgcacctggccaatgatccttttttttttcttttctgtttgaggtggggtctccctctgttgcccgggctggagttcagtggtgcagtcattgctcactgcagcctcaacctcctgcgctcaagcgatcctcttgcctcagcctcctaagtagctgggactacaggcgtgtgccaccacgcctggataatttttttatttttaagtttttcatagagacgggtctcactatattgctcaggctggtctcgatctcctggcttcaagtgatccttctgcctcggcctcccaaagtgctgcaataacaggcgtgagccacagtgctcagcggtcctttttcttgaaccctgatagcagtgacaccaggattgctgtagttcatccaatgacttgggggcaggagtgagtgcaatcttagagactggggcttagtacccagaacctgtttcccttcctcgttagatattcctgtctttttacaaatgtaaatgtattataaaacatttcaggccgggcgcaatagctcatgcctgtaatcccagcactttgggaggccgaggggggcggatcatttgaagtctggagtttgagacgagcctgaccaatatggtgaaaccctgtctctactaaaaatacaaaaaaaattagctgggcatggtggcgggcgcctgtattcccagctacttgggaggctgaagcaggagaatcgcttgaacctgggaggtggaggttgccgtgagccgagattgcaccaactgcactccagccagggtgacagagcaaaactctgtctcaaaaaaccaaaaaaaaccaacaacaacaacaaaaaaaaacaccaaaaaacatttcagacgttcaagattatataccaagaacaccaatgtccccatcagccagctgaggaaacaggaaacaatatgtactagataggacccacttcagcagcaccctaaatccattcccccagaagtaaccaggagggccgagttccttgtgtctttccctttcttgaatttgtatttttactaccttggtatttggttttaaagtttacataaacaggatctgatttttcttccactcaatttaagggaggttcgtggtgtcttatctatagcctctaattcgtttctcactcaagccctgtacagccagatactgctgttctttggctgagcctcaggtaaaatggttggctctccagtcctttatagaaaatcatggcaggaaggaatgggagagaaaacagattctgcctcccagctccacgtgaggaagagttttattattaatttttattttattttttttgagacggagtctccctctgtcgcccaggctggagtgcagtggcacaatctaggctcactgcaacctctgcctcctgggttcaagcgattcttctgctcagcctccccagtaggtgggactacaggcgcgtgccatcatgcctggctaatttttttttttttttgttatttttagtagagacgtggtttccccatgttggccaggctggtctcaaaactcctgacctcaggtgatccgcctgcctcagcctcccaaagtgctgggattacaggcatgagccactgcgcccggcctattattattaattttaaaaatagagattgcagtcttgctatgttacccagtgtggtctcaaactcctggcctcaagcgatcctcctgcctcggcctcccgaagcactgggattataggtgtcagtcacagcgcctggccagaagagttttcgagggctggcttttcaggtcgttttctgggcctcaatgtctatttctgacaatgtggggaaaagaaagatcagattgttactgtgtctgtgtagaaagaagtagacataggagactccattttgttctgtactaagaaaaattcttctgccttgagatgctgttaatctataaccataccctgttatagatgacggggttctctataaccaaccccgtgctctctgaaacatgtgctgtgtcaactcagggttaaatggattaagggctgtgcaggacgtgctttgttaaacagatgcttgaaggcagcatgctccttaagagtcatcaccactccctaatctcaagtacccagtgacacaaacactgcggaagaccgcagggacctctgcctaggaaagccaggtattgtccaaggtttctccccatgtgatagtctgaaatatggcctcatgggaagggaaagatctgaccgtcccccagcccgacacccgtaaagggtctgtgctgaggaggattagtaaaacaggaaggaacgcctcttcgcagttgagacaagaggaaggcatctgtctcctgcccgtccctgggcaagtcttggtataaaacccgattgtatgttccatctactgagataggggaaaactgccttagggctggaggtggaacatgcgggcaacaatactgctctgtaaggcactgagatgtttatatgtatgcatatctaaagtacagcatttaattctttaccttgtctatgaaccgttgttcacgtgtttatctgctgaccctctctccactattatcctatgaccctgacgcatccccctctccaagaaacacccaagaatgatcagtaaatactaagggaactcagaggctggagggatcctccgtatgctgaacgctggtcccctgggccccctttatttctttctctatactttgtttctgtgtctttttctcttccaaagtctctcgttccacctaacgagaaacacccacaggtgtggaggggcaacccatcccttcagacaattgggaggtgagggccgattgccttacacggtgagacaagcggcctgactcgtgactatttttttggacaaatcaggcagccactgactcccttcattatggcctcagctttatctctgggcaataagtgtgatcccttccttcgctgcgtcctttgcaggggcggtggcgctctgcaaggcccaagggggcgtggtccagatgactttgaatcccagttgtcgcccccagggtcagccaggagactagtcagaagcaaacgcgcctgcggcaatccgcccgatgcctttggtctctctcgggcttccgtccacccgcccctcccccgcgtttccattggctgtagctccggcccggggcgggcgaagagggagcgagtgggcggggccgcgtggcgtcagcgcaagatggcggcctcggcagcggtgttctcgcgcttgcgaagcgggctccggctcggctcgcggggactgtgcacgaggttggcgacgccgccccgccgggccccagatcaggtgagcggaacgagggtggccctctgaatgtggggtcccttccctggagttacggacatatcgccgccccttgggggttccgggacgcctcacctcagggtgctgaatgaaacgccgcttgtgttttggggcccttcccaacctcctgggtggttgctcccctaggctggaggctgggaatccaggtgtgtccttagaccccacctcccacccacgtgggtgccggaggaggagggggttaccgttccccgtttcagtgaccactcaggtgatacttgagcaggaggggcctgggacgctggagtcccagtctggccgtgggagttattttctctgtggcgttggtggtggcgaggtagacgtttgggtttccaattcgacttgcctccatgttgacagagacccagccattctgacctccaagtctatcacttctgtgccttagttccccaagccccagacaagtgattgcccttccccgcctccgctcctatcccttaccctataactctgctacttttagccccaagcagccggacgtcgtaactcccggttctgtctgtaccccttcccccaccacttgtgccctccgttccctctcatcccagtgtttaggccctcccatcccttattctccgtgctttgcttttctgggctgcagaccctccagtcctgttgccttcaggatcctgtgcacctggcctgttagcttttaaaactcctggcatcctggtgcgggacagtctggttttgaccctctgagcagccccacatcctgactgctactccagggacacagatgtccagggctctgtgggtgtctgcctcttggctcctgaacttgattcttcttggactggagggtggggaccatcctgacctctcttctctcttggctgacctcccctttctcaaccgcaggccgcagagatcgggagccgcgggagcactaaggcgcaagggccacagcagcagccgggctcagagggtcccagctatgccaaaaaagttgcgctctggcttgctgggctgcttggagctggtgggactgtgagcgtcgtctatatctttggtgagggacatatccctgtcccccagttttgttccttggcctccctggtccactgtggaacctcccactcttgcccactaccagcttctctcgtcttcattccctggctccttcctcaatagggcagccaaataagacacctaccttgaaaaccagggaagtcttctttcttctcccttccactccttaaggttctagtctttctagttggttcctgtaccaggataaaggaaagaggggaagatggggaaggataggcctggatcagcttcctaaactttgtctttcctcagcagccaaaaatccagccttcccactagttactttaaatcccacagacccggccgggcacggtggctcacgcctgtaatcccagcactttgggaggccgaggcgggcggatcacgaggtcaggagacggagaccatcctggctaacacggtgaaaccccatctctactaaaaatacaaaaaaaaattagcccggtgtggtggcgggcgcctgtagtctcagctactcgggaggctgaggcaggagaatggcgtgaacccgggaggcggagcttgcagtgagccgagatcgtgccactgcactccagcctgggcaacagagcgagactctgtctcaaaaaaaaaaaaaaaaatcccacagacccaaaagacctagccccagccccatttctctcaaagacccaggaatcttggctcccagccccctcctggcttgactccaggaggctgtgcctctctctttcctcagatccaggagtccaggccccttatcccactcctccctcgggacccaggggactgggccctaattcctcatattcatcctggtctcccttgcaggaaacaacccggtggacgaaaatggtgccaaggtgagggggaaagagaccgaggccttgccaggagtcctagtctgtgggtgagaggggtcccctttggtctgttcaggcacattgctggtctggagtgagcctttctttcccagtgacctttgcctgttcctcttggggtcctggagattccttttctgtatgtgatggggttctgcctctgacatcctaaaccttccatttttctctctacctcccagattcctgatgagttcgacaatggtgagtaaacaagcacagattctggagtccctgaccctctcaactctgtcatttgtaaggatgtctctctccccatctggtgtctccggcccctcctccttccactggggaggtgggggagccagcagctggatggctttgtggggagggacattacaaagcccaagcccacttccctggcccctcagccccgagcagatggtcagagacagatgggggattggagccttgggtgggagggcttggggacacagggtggcctatctccagacacatgggttcctgtgccttagaccaagcatctgcggttcccaactccttccccatccccctcgagcccctaccccattaggctcattttcaaaactatgccgccttcctctctccccttctggttaaccagcttttggtggtgaagtagatgacaaattggatagtagagagtagctgtcaatcctgtcacacctggctcttcctaggagaaaaatgaaattggtgggtccagaaagccacctgtttatgctgggggatgtttgcaaacagtcatgttaatacattgattgtttcaaactgggcagttgtagaatcatgctggcttcaacaaatcagtatgctgatttaaattgggcaggtacatctgcagttttaaagtgtatatgtttactagcctaactggtttcaatattgtggtttatttttatttttatttttttttgagacatagtcttgctctgttgcctaggctggagtgcagtgatgcaattttggctcactgcaacctccacctcctgggttcaagcatttctcgtgcctcagcctcccgagtagctgggagtacaggcgcacaccaccacactcagctaatttttatagttttagtagagacagggtttcaccatgttggtcaggctggtctcgaactcctgacttcaggtggtcactcgcctcagcctcccaaagtgctgggattacaggcttgagccaccactcctggcccaatatattgtgttttttttaagaggcaggcccatgtattgcactaaaaatactgtattaaagtaggtagccttgtaagtttactgttttatactggattcattagccgggagtggtggcctgtgcctgtggtcccagctactcaggaggctgaggtgggaggatcacttgagcctggaagttacaggctgcagtgagctgtgatcccgccactgcactctagcctggatgacagagtgagtctccatctctaaaaaaaaataagttaaaatgagaaagtaaactggagtcaatatattcacttaaaccagggtttttcacccttggccctattgacgctttggaccagataattatagaggactgccctgtgcattgaaggatttttgcagcatcctgggcatctgcctactagatgccagtattgcgataaccggttatatctcccggcattgccagatttcccaggggtaggcagatagacaaaattgttcctagttctgaaccactgttttatggtatatggatgtgtttatatatttattgtggtttagattcagcacactggattaaagtgggcagatctggaagcctagtgattcaaagtgggcaaaatacagtggcataaattaggtgtggtggctcacgcctgtaatcccaacactttgggaggccaaggcgggaggatcacttgagcccaggagttcaagaccagcccggtcaacagagcaagaccctgtctctattaaaaaagtatgtataccctggtgtaatgtcagcagatttacatgtatgtgggttttgttttgttttttttttttctgagacggagtcttactctgttgccacgctggagtgcagtggtgcaatctcggctcgctgcaacctccacctcccgggttcaagtgattctcttgcctcagcctcccaggtagctgggactacaggcacatgccaccacgcccggctaatttttttttttttttactgttttagtagagacagagtttcaccatgttggccaggatggtcttgatctgacctcgtgatccgtctgcctcggcctcccaaagtgctgggattacaggcgtgagccaccgtgcccggccttgtatgtgggttttaagtgggccaatgtaataagcattctgtttcatacctggggtagtatgtggatataagtatcagcttaaaatagggcaagtaaataaatctgtgttcctatctggcggtatgtcattgccttctatctttggacctagaaatgagttggttcaaaccaggcagatatgcagacctgtttgtatctggtagataagaaacccctggtttgtctgggaggttgaacagcggcttattgtggaatctctttgtgcctggtgttctcctagatccaattctggtacagcagttgcgccggacatacaaatatttcaaagattatagacaggtgagcagaagccctgggctcagtccccatgtctccagccctggcctccttgtctgagcgcccccatcctgtccctctcccacagatgatcatcgagcccaccagcccttgccttctcccagaccctctgcaggaaccgtactaccagccaccctacacgctcgttttggagctcaccggcgtcctcttgcatcctgagtggtcggtgtgtcccgggaaacccagtgggttggggatagacctgggcagtggggttgtgatgaggtggactttcagccctggctgtgctatgtgatcttggggaggagatgtcacctgtcattgcctcgctttcttcagctgggagaaggcagtcatgctaacacccactctgtagggtagtgtaggtgtgcccaggcacgctataagtgccacaaaggagccagacccgcagtcacagcctatgaacttcttgacctccaagagccacagagacagagggagagaactctgttctgggaatcccccaggctggatctttgtcctcttggggactctgaggacctctgggtcttggtgtttcactgtcctcactgtcttcccagctggccactggctggaggtttaagaagcgcccaggcatcgagaccttgttccagcagcttgcccctttatatgaaattgtcatctttacgtcagagactggcatggtgaggctctggggcaggggagggaatattggtgtggtgggaggcgtagagatctggaggaccagggctcagcctgaccttttctcgctcccttcccacccccagactgcgtttccactcattgatagtgtggacccccatggcttcatctcctaccgcctattccgggacgccacaagatacatggatggacaccatgtaaaggtgccgtgggttcatgggtgggcctctgggatttggcggagttggcaccacctgagggaaggagggcccagctctgaccctagcctcacctggcttatggttctgcccagattcgattcctgctggcaggcacatgcctgcctctagccttggccagacatctgcacccttctttgttccctggaatctgggtgtgggagtggggggaaatggggtctctctaaagaagacagttgggggttagtggtaaggtcgtacgatttagaagctggttttatcttgctgtgtctgtaacttagtgtttctgggaaggtttgcttatagttgtacatatgagactggttggggtttgtttgacccgggctctgttactgtggccagtgctgtattcaggagtccggatctgcgaatgggcctctgtgggtctggctccaagtgtctgtgtgtctgttggtttctgtctgtgtcgtgtcggggtgggggttctgtgttgctcttggaaattccaaaatacgtgggctgtgatcgagggtcttgaagggtctgtgtctgggtgcctgtctgtgtggttccctgggtgtggctgcagatctgtctgcacctgtttacttgagtgagaggttcttaaacctgcaacataccacagtcacctgggcaggggttaaacacgagagtggccacctccctctccagggaacttcctaatcacctctctgtgtgctaggccctgggtctagaagtctatgtgattagctccccaatatcctgggggttgttttgttttttgtttctgagacagggttttgctctgtcacccaggctggagtgcagtggtgtgatgaacatggctcactgcagtctcaaccttctgggctcaagcgatcttcccacctcagcctcctgagtagctgggcctataggcacacaccaccatgcctggctaatttttatttttatttttatttatttattttttttgtgagacggagtctcgctctgttgcctaggctggagtgcagtggcgcgatcttggttcactgcaacctccccctcccaggttcaagcgattctctttcctcagcctcccgagtagctgggactacaagcacacaccaccacacccagctaattttttgtatttttagtagagacagagtttcgccatgttgcccaggctggttttgaactcctgagctcaggcaatctgcccaccttggcctcccaaaattctgggagtacggtcgtgagccaccgcacccggccattttttgtatttagtagatacggggtttcaccattttagccaggctggtcttgaactcctgacctcaggtgatccgcccgcctcggcctcccaaagtgctgggattacaggcgtgagccaccatgcctggccctctgtgggggtcgatgccatcatccaaagccggtctttgagaggccctgccattgtgatcccagtatgtgtgatgctgtgtatgtatgtatgttttgtgtgttttgggtcttcttgatggggggagagttgggcacagatgttgacctgatctgtcactcacttccaggatatttcatgtctgaatcgggacccagctcgagtagtagttgtggactgcaagaaggaagccttccgcctgcagccctataacggcgttgccctgcggccctgggacggcaactctgatgaccgggtcttgttggatctgtctgccttcctcaagagtaaggctgacccctgatcccttggcctctgaccccagagcccctgactctgaagaggaaggataaatgcatgattcatggctgggcgactgaggtgcaagaggtgcctgagcaccttggagtctttaggagcttcttaggatgttcatggaatgtttgggggatacttggggatgttcaggggagccctttcagagcgttcagaagcattccaggtagcactgactgcccccgtgccccagtgcgggacgttcccctcatgggccctgcctccctctggcctttagaagcctggctgaccaccccctgttgtgcccacagccattgcactgaatggtgtggaggacgtgcgaaccgtgctggagcactatgccctggaggatgacccgctggcggctttcaaacagcggcaaagccggctagagcaggttggtgctcagatgcccagagtggaggatcggctctgaggctcctgaaggaggagcctggggcagtccatctccacactcttggtttggctgtgtgaccctgagcagatacctcctctctgcctcagtctctgtaaccagggggatataacacagcctgtcctgtagggctgccagaatgaggggatgcattgattctgcagcctgctctgagaacaggaaacaggagaggatttgagattaggctgggagaggggttgcccttgatggtcttgagtaggtctgggggcaccttgtggaggtggattgtgggttttagatcaggcctggaaagaggctccctgggcacgtggcccaaggctgtggggagagatgtgatagtcttggtgggaccctggtaatttggaagtgggactgagagtatggattgcgtctgggtaagattcccaggggtctaggctgaggttcaccagattctaggttaggttcctagagttgggagcccctgagtgcccagagaagtccctagagatttgggcctggggaccccccagggaaccccccacccctgcatccagagaggggtcatggggctcagagggcccaggggcaggatgatgcagtctggtgaggagggccatggggtttggacctgggatctcaccagcattcaccttggggtaacagggtctgcgataggatctcaggctcaggggaggggtccctgggatctggggaaggagattatgacagtctggggcctgagaacctactgcagttcaggcctgaatacctcgagtgcctagtattggagtctgtcgtcccccaaacattgaagcctaggctcctgcggctcagagctggctcttcctagtgtctggggtggggggactggggtctagggtcccttgtgtctgggctgggggccccagggtttggggaaaggggtctggacttggcagaagtcagaaggaaaggtggtccctgggctgaggcctggggacctgggcatctgggaggaggctctgtccaccttgcgctgaccctctcctccaactgtccccctaccccaggaggagcagcagcgcctggccgagctctccaagtccaacaagcagaacctcttccttggctccctcaccagccgcttgtggcctcgctccaaacagccctgaactctgggcctcctcaaactcagtgcctgggtccagggccccagtgcttccagaccaagacttgggccaccacttgtccaataaagtacatcccagacgccacacctgctgtgtcccgagagtctccagatgggggcatcagggtgaggtccgggactcttgggtcatcgtcccacagtggctgatcggctgccaagcacagtgggggtgctttgttggatcagagcagatttttcaccctggtctcggaatctaaaaaccctcgctgtgtcttcctgtgtgttgcgtgatctgtgaaaaatacatctccctctgaccacagactcctcatctgtggagaagggaagagaggatggcacttggctttaaagacaggtagctgccaggctactgtggagagaatgtgttatgggcctagtgggcctctggtggaccagagattacccctctcaacaggccagctgctggttggctccagccagtgtggccctggggtaaagggggcctggagttgcttgacacgccagttgttcaaaagaagcaagaacttgggaatattttttttttttttttgagacagggtctcactgttgcccaggctggagtgcattgatgtgatcttagcttacaacagccttgacctcccggctcaagtgatctccaagtgaccctcctgcctcagcctcctgagtaccctcctggggactacaggtgcgtgctaccatacccagctaatttaaacaaattttttttttgtagagatggggtcttggtgcccaagctggtctcaaactcctagtcttaagcaatcttcctgctttggcctcccaaagcgctaggattccaggtgtgagctactgtgcccagctaaaatagggatttttatattaaatctccctattttaaaatgttggctcctagcggggcgcagtggctcacgcctgtaatcccagcactttgggaggctgaggtgggtggatcacctgaggtcaggagttcaagaccagcctcaacatggagaaaccccatctctactaaaaatacaaaattagctgggcgtggtggagcatgcctgtgatcccagctactcaggaggctgaggcaggagaattgcttgaacctgggaggcggaggttgtggtgagccgagatcgcaccattgcactccagcctgggcaacagcagcgaaactccatctcaaaaaataaaataaaataaaaataaaatgttggcttctaactaaaacaggcagatatgtagcagtgttctccactggaactttctgtgatgtttggttcatgttctaggtctgtactgtccagtacagtagccagtggccacataaacctttgttttttttttttgagacggagtttcgctcttattgcccaggctggagtgcaatggcacgacgtcggctcaccacatcctccgcctcccgggttcaagcaatgctcccgcctcaacctcccaagtagctgagattacaggcgcacaccaccacgcccggctaatttttgtatttttttagtagagacagggtttcaccatgttggttaggctggtctcgaactcctgacctcgtgatccgcccgcctcggcctcccaaagtgctgggattgcaggcatgagccaccatgcctggccccacataaagtttctgagcacttgaaatgtggctagtgtgactgagaaactgaatttttaattttgtttgagactgggcacagtggctcacgcctgtaatcctgacactttgggaggccgaagcaggaggattgcttgaatccaggagtacgagaccaccctgggcaacatggtgaaatcctgcctctaaaaaaaaaacaaagtaacgagcccagcgaggttatgcatacctgtagtcccagctacgtgagaggctgaggtgggaggaatcccttgagccaaggaggtcgtgcgtggctgtgatgatctgtgatcgtgccgctaaattctagcctgggcaacagagcgagaccctgtctcaaaaaaaaaaaaaaaaaaaaaaaaaccttaagatttttttttggagtcagggtctcgctgtgtcgcccaggctggagcacagtggtgtaactatagctcactgcagtgttgaacttctgggctcaaacaatcttcctgccttggcctccccaaatgctgagattataggagtgagccactctgcccaactacttttaattaaatagccacatgtgtctcctgtattgacagtaccactgtgtattaagagtatgagtcccagattgtgtaagttcaaatccaagctctaccacttctcggctggcttgtgatcctgtgcaagttactttacctctcagtgcctcggtttctacatttataaaataataactgggcaggcacagtggctcatggctgtcatcccaacacttcaggaggccgaggtgggaggatcgcctgaggccaggagttggagagcagcctgggcaacatgggaagagcctgtctcttgcgggggggggagaagaaagttcttgtctcaggctagctttggggaccaaatgaagcactcccatgtaggcactcaaatggaactatgtaaaccttaggcaaggcacctctgcctcagtttcctcatctctaaaatggggtgatggtagtatgttagcagagtggttgtgaggagtgaacgggacagtccgtatgtgggttatatgtatatattcccaggtgcttgctgttaccaggccatatgggttattcacagattgaaatatcttagctgggcacggtggctcacccctataatcccagcactttgggagaccgaggcgggtggatcacctgaggtcaggagttcgagaccagcctggccaacatggtgaaaccctgtctctactaaaaaaatacaaataaattagctgggcatggtggtgggtgcctgtaatcccagctacttgggaggctgaggcaggagaatcgattaaacccaggaggcagaggttgcagtgagctgagatcacaccattgcactccagcctgggcgacagagtaaggctctgtctccaaaaaaaaaaaaaaaaaaaaacaaaaaaaaaaccagtttgactttatctccctcgccctgcctccatccccacattgccccccactatcccagtctctcctactccagccttcatctagtgctaactgattaaatattctaagatgaccttctctggtgtgtgtgatgataattaaaaggcattcagaactgtgtggaccagactgaacctctgcactctagatttttttttttttgaagcctctacaaaggataattaaaatttacaccatgactctttgtcctggggtgcactgtctgtaagccggtggagttatttcccaaaatccttggtccttcccagcttgaggaagtctgcaggactgagggaggggacctgtgcttttttttttgtttttttgagatggagtctctgttgcccaggctggagtgcagtggggcgatctcggctcactgcaccctgcacctcctgggttcaagtgattctcctgcctcaggctcccaagtagctgggattacaggcgtgtgccactgtcaggcctctgagcccaagccaagccatcgcatcccctgtgccttgcacatatacacccagatggcctgaagtaactgaagaatcacaaaagaagtgaaaaggccctgccccgccttaactgatgacattccaccattgtgatttgttcctgccccaccttaactgagtgattaaccctgcaaatttccttctcctggctcagaagcacccccactgagcaccttgcgaccccccactcctgcccgccctttgactgtaattttccattaccttcccaaatactataaaacagccccacccctatctcccttcgctgactcttttcggactcagcccacctgcacccaggtgaaataaacagctttattgctcacacaaagcctgtttggtggtctcttcacacggacgcgcatgaaagccaccacactcagttaatttttgtatttttagtagagacagtttcaccatgttggccaggctggtctcgaactcctgacctgaggcgatctgcccgcctcagacttccaaagtatggggattacaggtgtgagccactgtgcccggcctaatttttgtatttttagtagagatggggtttcaccccgttggtcaggctggtcttgaacttctgacctcatgatccacctgcctcggcctcccaaagtgctgggattacaggcgtgagccaccgcgcctggctttttgttttgttttgagacagtgtctcactcttgctcacactggagtgcagtggcgctgtcaccactcactgcagcctcgacctcctgggccctcgtgatcctcccacctcagcctcccaagtaactgagactacaggcacatgccaacatgccaagctaattttttgcattttttttttttaagagagatgaggtttcaggccgggcacggtggctcacagctgtcatcccagcactttgggaggccaaggtgggcgaatcacgaggccaggagttcaagaccagcctggccaacttggtgaaaccccgcctctactaaaaataccaaagagtggctgggcgtagtggtgggcgcctgtaatcccagtcactcggaggctgaggcaggagaatcgcttgaacccaggaggcggaggttgcagtgagccgagatcgcaacactgcactccagcccaggtgacagagtgagactctgtctcaaaaaaaccaaaaaaccaaagctctgctgtcatgagctgatgttcagtgttctcatggaggagacaaacaatgatcagataacttcctagggtaataaatgcataaagaaaaagtatagcaaggagcagcagtgatctggggactcagaggactggtttagacctgatgggatggtcgggaggcctcttgggaaggcgcatctgagcagagatgggatgaagtgaggagggaagccctgggatagctgagtgtgcctgaggcacactcagggcctcatgcttaccgcaaggcctccgcaattgctgttcgctctgccagaagtgtttttccctagagactacacaacttactcctttaggcctttgcttaaatgtgaccttagcatggcctattttttttttttttttttgagacagtcttgctctgttgtccaggctggagtacagtggtgtgatcttggcttactgcaacctccacctccaagattcaagcgattctcctgcctcagcctccccagtagctgggactacaggcgcccaccactatgcccggctaagttttgtatttttagtagagatggggtttcatcatgttggccaggctggtctcgaactcctgacctcaagtgatctgcccgcctcagcctcccaaagtactgggattacaggtgtgagccactgtgcctggccagcatggccttctatggtgactacagtcaacatataaagaaaagttgtgaatagccagaaagatgctcagaaatcccttaaagtacacgacacgacacacgcacacacaccacaagaaaatccacaagaaatgccatcgtgcctgccacaaaccttcacaaaggctggcaatttttataatctttaaaattttagagccaggctcagtggctcacgcctgtaattccagcactttaggaggctgagacaggagcatcactcgaggccaggagttcaagaccagcctaggtaacatagtgagactctatctctaggaaaaaaaaaaaaacaaacaggccaggcgtggtggtgggcgcccataatcctagctaaatgggaggctgaggcaggagaatcgcttgaacccgggaggcggagattgcagtgagccgagattgagccactgcactgcagcctgggtgacagagcgagactccgtctcaaaaaaacaaaacaaaacaaaaacaaaaaaaccccaaacaaaacaaaacaaaacaaaaacaaacattctgagatatctcagacctggaatctgttccccccaatgatcatccagggcaggaatttgcttccttccatagctggttgcccaaattctgttaaaatatattctgtgatgggaagcctattccctcacctaacccagtattagacctaatttgcctccaggtgactttggtttacaaggtctggctttactccttggggccacataacttgtctgacctcggggggatgtggaaggagggtctcaaatgtcagccttagaagcttacatatttagaaggcactggggagctacagaaaagtctaatgcaagtgaaggaaatggtctgatttgtgcttagataaaccccacagggccaggcatggaggctcatgcctgtaatctcagcactttggaaggccgaggtgggaggatcgcttttgcccaggagttcagcctgggcaacatagggagaccccatctctaccaaaaataataaattagccaggtgtggtggctcatgcttgtaatcctagctacttgggaggctgaggtgggaggatcatttaagcccgggaagtcgaggctgcagtaagctaggataatgccactgcaccgcagcctgggcaacagagaccccatctcaaaaaaataaagacctcataggccagaatggtcaaggctgagggaggcacagacagaggggtcgggcagaataaaagaatcatagggggatgtgggagctcagaggaggtgcttgatgcttctggggagtgttaggtagtgctgcctggaggaggtgaagtctgaatggtgaaaaaggaattaaagaagggagtggagccgggcacgttgggtcacgcctgtaatcccagcactttgggaggccgaggtgggcggatcacgaggtcaggagttgaagaccagcctggccaagatggtgaaaccctgtctctactaaaaatacaaaaattagcgaggcatggtggtgcgcacctgtaatcccagctactcgggaggctgaggcaggagaatcgcttgaaactggaaggcggaggttgcagtgagtggagatggagccgctgcactccagcttgggcaaagaataaaactccatctcaaacaataataataaattaaaaaaaaataagggagtggaaaagacaaatacagggaaaaggagcctgggatgttctgcccaatctgacccatggcgctgccttgctcaaacgccactgttgtcagaattaagagaagaatctttaggctgtttttttctcctcctcctcctccttttctttttttttgtagaaaagtgtgtcttgctgtgttgcccaggctggtctcaaattcctggcctcaagcagtcccctgcctcagcctcggaaagtactgggattataggcgtgagccgctgtgcccagcctggtcttctttcattcattaaaaaattaactgcgcagggattagtggctcatgcttgtaatcccagcaatttgggaagccgaggtgggtggaccacttgaaggtcaggagttcgagaccagcctggccaacatggtgaaaccccgtctctactaaaaatataaaaaattagccgagtgtgttggtgggtgcctgtaatcccagctactctggaggctgaggcagcagaatcgcttgaacccgggaggtggaggttgcagtgagccaagatcgcaccactgcactccagcctgggcaacaagagcaaaacttcttcttctgaaaaaaacaacaacagcaacaacaaaaaacagagcgcctactgtatgcctggctctgctgggctaggcttcgttggttactatatcttacttctctggaaaaagacatataaattgaacctgtattttcccctataattattagcctctaagcactaaagttttttactttgggggggaaaaaaaagaagttaccccagctcaagggttttgccccatgcctggcagggagcaattatgaccagaggggctgggacatctgctcctaattggcttttcctgctgaggtcctggaatactaaagggtttctgaagggcccgggatgtccccccccccagttcttctggggtgggggagcgggtccctgtatgtgaagacggaatttcctgcccatttgctcctcacaccttccggaggccaaacgggcagcccagctgcggcccgaagggggaggggctcggccgcccggcagatggcggcatttacatacagctgggagccccctcttgaggccgagctcctcgccctggcgtctggtgcgtccgcgatgcggggtttgggagggtggctttgtcttgcggagggggaacacacacacgcctgcacacaggggtccacaaagagccctggatcttcatcgtatccacacacagctacacccgtggatctcccaaacccagtctcattcacacaaaccagcgcacacaggggtctacaaagaactccggatcttcatcgtattcacacgcggctgcatccgtggacctctcaaacccagtctcattcacacacaggcgccctcagccattcaccaccttgcacagcctctaccacacccgcacagagcacaaagtcacaggtttatacgcctatacaggatctcccataaacacacacgcacagagaagcagccacacagccacacaatctcaaagcgtcacacaatcacgaagtcgtgtacacttctagtgtcccactcgggtgtgcgtgcagaatcagaattgtttacaacctcataaatgtgtcaatcacacacaactccaggcgtatgctgagccgcacagtcccacgtggactcacaatgacaaagtcatgtgcaccctccggtagctctggttcataccacacacacaaaatcttaaaatcatgtacaacctcacacacaggcttagccccctaaccccaccccaccctagccacacaaaaagtcgcgggatcacccacgcatgacctcgctcgtgcccacgaccacagacggaatctcgctgttgctcctgcacgctccccctcccctgtgaccgccccccccgccccgcccttggtcccttggggccgggtagctgcctgaaggggcggggccattctctcagatataaggcttggaagccagcagctgcgactcccgagacccccccaccagaaggccatggtctccccacggatgtccgggctcctctcccagactgtgatcctagcgctcattttcctcccccaggtcagagccaggtgggaggtggcgtggaaagggatgaatgcggaggggaggggtgagtgcgacctgaaggtcctggggaaggagcgtggggcggacgggaagcctgggtcctcccggccgcctcaccctgcgcccgtctccgtcccagacacggcccgctggcgtcttcgagctgcagatccactctttcgggccgggtccaggccctggggccccgcggtccccctgcagcgcccggctcccctgccgcctcttcttcagagtctgcctgaagcctgggctctcagaggaggccgccgagtccccgtgcgccctgggcgcggcgctgagtgcgcgcggaccggtctacaccgagcagcccggagcgcccgcgcctgatctcccactgcccgacggcctcttgcaggtgcccttccgggacgcctggcctgtaagtgctgcccccgggggactcccggtgctggaggcctaaccctgccagcgaaacctccacctcctctcccctccagcttccaagaccctaatcctgcctcccagggggtggacgaaattcccagaccagtaactctaccgtctggaaccccacattcacagacctctaaactctacacactggggattctaaatgttctgattccccaaccctggatgctgggaccccaaattcccagaatttcaaacccaagctctgaaatcctaaactcaaggaaccctacctctgctccttggggatccctaaaaactgtggtcctcatctttatccccaaacctctcacaccttgtcttggggaccactaatatcttctctctctttttttttttttttctgtcctcagttctttcagttgggtcctgtattaattactctttcacctccaaaatcctgtctcccacccccacaacccaaaggcacaaagatgaacagacctgtattgcaatgcttgacccttgtccttttggacaagtgactgcctggtttccagcctcagtttcctaagcttaaaaatgggatcatcctggtacctcacaagggtcccttttgagcgattcaaccacatctcttgaataaagtgcttaccacgtagtaagtgctcaataaagcaagccacgtccagtcgctcacactgtaattccagcactttgggaggtctaggcaggaggatctcctgagcccggcagtttgagaccagtctcagtaacatagtgagacctcgtttctaaaaaaaaaaaaaaaacatagcagggcatggtgacatgcgcgtgtagtcccagctactggggaggctgaggtgggaggattgcttgagcctcggaggttgttgcagtgagccaagattgcgccagtgcactccagcctggttgacaaagtgagattctccccccccccccaaaaaaaagccacagatgtcattccctccctgggctggtctggtccctctgggaattgtcccttgcttgctcagtccccagcaatggccatcaccctccattcctgaactctggccttcattgagtacttaccctaaccactgtctttcatctttcatctcccccttccttcacccaaccagggcaccttctctttcatcatcgaaacctggagagaggagttaggagaccagattggaggtgagtgtcttcagtcttgggactggtggggagctggggcccacgtgagacacggggttggtggtgttatctataggtcttatgatgtcatcacagctcctgggatgtggtgctgagtgttgacagctccagggctcttggcatctcaggcacagaaatgtccctggtactggatgtagcagtggttctggtaccagacgaagtaggggaagctctcttactatcaaggctccagagcagagtgtagcatttcacagccctaccttatcatctgatgttgagagctcagggtgcgatatgaattacttctggttcttttatgtgaagttttttttttttctttccaagacagagtcttgctctgtcgtccaggctggagtgcaatggcatgatctcagctcactgcaacctctgccttctgggttcaagcaattcttctgcctcagcctcccaagtagctgggattacaggcacccaccaccacacctggctacttttttttgtatttttagtagagacaggatttcaccatgttgtccaggctggtcttgaactcctgacctcgtgattcacccaccttggcctcccagagtgttgagattacaggcatgagccaccacgctcggcccctatgtgaagctctgtcaccttgtccatgtggacatcccagggagccccgtgggatgttggagcttcaccaaggcgaatattgagcagaggttcctgggagggatacagggcattcctatcctcaacttgggagactctgttgctatgtaaggcccacagcgggggttttgtcaccattttttttcttgtttttattttttatggacatgggatcttgctatgttgcccaggctggtctcaaactcctaggctcaagcaatccacaggctttggcttcccaaaacgttgggattataggagtgagccacttcttcaccgttctgatgtagaaagctgtgtcacaatcttggggggtgacacctttgccttcaagaaagtgtcactctcccagtatcccaaggtctcaggtaatgtggtaacttatggtctagtaactggggtctctgtgactattttgatataggaagatccagaggcacaatttaggggtgttatgacctcacttcagacatgttattgttctttggccatatggaggtaccaaatgtcacagggtgttagaggtctcatcattacttcaatttacaaagatctgggtcaaggcccggcgcggtggctcacgcctgtaatcccagcactttgggaggccgaggcgggcggatcaggaggtcaggagattgagaccatcctggctaacatggtgaaaccctgtctctactaaaaatacaaaaaaaattagccgggcgtggtggcaggcgcctgtagtcccagctactcgggaggctgaggcaggagaatggcgtgaacccgggaggcggagctggcagtgagccgagatcacaccactacgctccagcctgggcgacagagtgagactccgtcgcaaaaaacaaacaaaaaaaaaacaaatatctgggtcaaaatacaggagtattacggtttctatgagataactgtttattttttatttttatttttttgagagggagtcttgctctgtcacccaggctggagtgcgatggccgatctcggctcactgcaacctccacttctgggtgcaagtgattctcctgcctcagcctcccgagtagatgggattacaggtgcgtgccaccacgcctggctaatttttttaaagaattttttatttttagtagagacggtttcaccatgttgatcaggctggtcttgacctcaggtggtccacccgtctcggcctcccaaagtgctgggatttcaggcttgagccaccatgcttggctgagagaaatgttacctagagtactagaaaggaccacgacattgcaggtcccagggtgcattggggagttcgcagccttgctaaagtagagggtgactgccattctactcgcgaggtccaaggaccccagggctccatgagggtgttttggcctcgctgggaggggcggggagaatgcggccggggcgctccgtatgcatccatgttcggccgggcccaccccagcacccctcctttgcctgtcctcgcagggcccgcctggagcctgctggcgcgcgtggctggcaggcggcgcttggcagccggaggcccgtgggcccgggacattcagcgcgcaggcgcctgggagctgcgcttctcgtaccgcgcgcgctgcgagccgcctgccgtcgggaccgcgtgcacgcgcctctgccgtccgcgcagcgccccctcgcggtgcggtccgggactgcgcccctgcgcaccgctcgaggacgaatgtgaggcgccgcgtgagtcctgcgttcgaccccaccccgtcccagccggggaccccggcccctcctgagcgtcactcgcggcccccagtcccctctcacaacccactcaccctcttcagggtactctagagtcccccaccatgtaccccaggcacccctcttcagggagctggggaacgcgctgactgctgcggatgtatcccaaaccccgcccaccatccagctgccaccttcggagaaactgaggaccctggacctctctccagccctgccttgctactcgagcccccttccctctcccagccctcttgttgccccaaatcggaagcccacgtccattttctatgctggcaccctccagttccttccctaacccacattcacaccctgtcctgatgctaggactccaaagctcttctaattctgcggccctcccgactcccactcggaagctttggaatctcctcccagtccactctggccaaggggccctccatcctccctccctagggttgcaggccagaacccatggcttcttaaagcttggaattcttcagacttctccccaaatttcagagccccaccaaggcccctaggactcccaggctaatccagatcttctcagagccaccctaattcaatacactcccatcttccctgaaaggccaggggtccccccaccaatcccaaatcccctcactgtctcctatcctcacgatctcacctgggtgcccctgtcccatcctctttccaagagcacagactccagcccgatggcctgggttcacatcatcactcctccacttcctaggtgggctggtcacctcgtctctgtgggcctcagtttccctatctgtaaactgggggggcggtcacagtaccatctagtcccgatgattatctgtcacaaagatgaagcaaggtggctcagggaacgtgctcagaaacctccctgctttccatcttgtccctggccctccccgacgttggtgttccctttctctctgcctctctgtcccccatagtggtgtgccgagcaggctgcagccctgagcatggcttctgtgaacagcccggtgaatgccgatgcctagagggctggactggacccctctgcacggtccctgtctccaccagcagctgcctcagccccaggggcccgtcctctgctaccaccggatgccttgtccctgggcctgggccctgtgacgggaacccgtgtgccaatggaggcagctgtagtgtcagtgtcacccttcccaccttgtcctgcttagtactttaccctgggagccacagccctctccctggggctccatgagacaccagcctggggaggagatctgggaataactatcagggaggtcttcctggaggcatccagccggcatctggggccttgaagtaggattaggtgatggggatgggactggggagagcaggctcagtgggtggccccgaaagatgcaggagtggaaatgatgaggagccgtgtggggccacagctgcccctactgcgggactgagaacgattcagggcccaaggtagtgggtggtggggccaaataggttggagatttgggatctgcgggcacagggggtggagacatcagagaaggcttcctggaggtggcccggggctggggcttctgggacgtgattagagagggtggccaggtgagtggcctgcagggagcaagggtgcagaggtggcagtgagtgagcctggcatggagtgctgggatagagtagggtccagtgtgggccacctggatactgccacactcagggttcaaatacttagggagaggccctgggaaggagagatccagagaagccttcctggaggaggtgggctgagatctaggacctcccagtaggactcgtcagtgtagacagaagcgagcagggcagaccaggcaggcagcatttggtaggcaaagatgtaggggtgggaatggggtcactctgggtccccagagcctcctccctctggggtcacatgggcagacagaagaatgtggagtggatcgaggggatgtcgggaggacctcccagggtggcccctgcatagtgggacttgagactggacaaggagcagcccccagtggttaggactgaggagggggatgggatttttctccaaggaaacacccttctcaagtactcttgtccctgcccaggagacacccaggtcctttgaatgcacctgcccgcgtgggttctacgggctgcggtgtgaggtgagcggggtgacatgtgcagatggaccctgcttcaacggcggcttgtgtgtcgggggtgcagaccctgactctgcctacatctgccactgcccacccggtttccaaggctccaactgtgagaagagggtggaccggtgcagcctgcagccatgccgcaatggtgaggcctggaggcctgaacggcgagggatggggtgggggtcctggatggctcagacagtccagggttggaatcctggctttgactcttctaaccctagggcctggggacctgaccttccacctgcaagcctgtaaaatgggcaaggagacattccctatctcataactattaatatttactgagaatttactgtgtgccaggccctattctaggcactgaggatacagcagggaatgaaacagacaaagtccctggccctgcctgatagagctgaggtgcctggtgtgctgaggataagcagggaagccagtgtggttatactgagatgaggtcagggaggtgactgaggcacatcttgtgggaccccctgggtcacaagaaggggaactttcacttttcccctgagtgagatggagccacaggaaggttctgaggagagaagagacctgatatcggtgctaaaagattaaatgcggcccggcacggcgactcacgcctgtaattccagcactttgggaggccgaggcgggcagatcacctgagctcaggagttggagaccagcccgggccacatggtgaaaccccgtctctactaaaaatacaaaaaattagccgggcgtgatggcaggtgcttgtaatcccagctactcgggaggctaaggcggaagaatcacttgaacccgggaggcggaggttgcagtgagccgagatcatgccactgcgctcccgcctgggcgacagagtgacactctgtctcaaaaaaaaaaaaaaaaaaaaaaaaaaaaaagattaagtaagatcatgaatgtaggctgaagcagagaattgcttgaactcgggaggcggaggttgcagtgagccgagatcgcgccactgcactccagcctggacgacagagcgagactccgtttcgaaaaaaaaaaaaaaaaagatcatgaatgtaaagggctggctgtgtatcttcttgcgagtgaatacaataattctctcccaaacactgagtgttcattctggggtgtgtggtactagggactcagcaccgaccaggacatctctgggccgcaccctcctgggggaaccagcccagaggggaagacagacaccctcagacagagcccagggtgggtggtcagggctgtgatgtaggagcacagggcagtgatcagggctgggatggaggaaggagcatcggagtagaaacctgaggggtgggctagggaagagaaaaggtgggaaaaaatgtgagaaaaggaggaagggaagagaggaggggtattctaggcagaggaaggccagagggttcaaacacgtagttctgggagctgtctactattgaagtatgatcgaagccgaaggaaaaagagacaagggcaccgagagccaaagaggtggagctgaattaattattccaaaacttcattaggaagaaaagcgagctggctttcctggcacactccaagacgctggcccttaagttagagagaaaaaggggaccccgtgcagcgatgacagagctgggaaacagcgcgggcaggtgggtccccggctcccggactgcgccctctgatgctcccttccccacaggcggactctgcctggacctgggccacgccctgcgctgccgctgccgcgccggcttcgcgggtcctcgctgcgagcacgacctggacgactgcgcgggccgcgcctgcgctaacggcggcacgtgtgtggagggcggcggcgcgcaccgctgctcctgcgcgctgggcttcggcggccgcgactgccgcgagcgcgcggacccgtgcgccgcgcgcccctgtgctcacggcggccgctgctacgcccacttctccggcctcgtctgcgcttgcgctcccggctacatgggagcgcggtgtgagttcccagtgcaccccgacggcgcaagcgccttgcccgcggccccgccgggcctcaggcccggggaccctcagcgctaccttttgcctccggctctgggactgctcgtggccgcgggcgtggccggcgctgcgctcttgctggtccacgtgcgccgccgtggccactcccaggatgctgggtctcgcttgctggctgggaccccggagccgtcagtccacgcactcccggatgcactcaacaacctaaggacgcaggagggttccggggatggtccgaggtgaggggctgcgccacagacgaacgccttgcgctgctggctgcttttacccatctccgtggtgcagttggcccgattccttgatgcatttccctggtcggtctctcttaccccggtagctggttttgggttcccctttgtgatgggtaggggaaaacaagatctgagaatttaaagagtctgagtttttcttctttctctcctcccacagctcgtccgtagattggaatcgccctgaagatgtagaccctcaagggatttatgtcatatctgctccttccatctacgctcgggaggtagcgacgccccttttccccccgctacacactgggcgcgctgggcagaggcagcacctgctttttccctacccttcctcgattctgtccgtgaaatgaattgggtagagtctctggaaggttttaagcccattttcagttctaacttactttcatcctattttgcatccctcttatcgttttgagctacctgccatcttctctttgaaaaacctatgggcttgaggaggtcacgatgccgactccgccagagcttttccactgattgtactcagcggggaggcaggggaggcagaggggcagcctctctaatgcttcctactcattttgtttctaggcctgacgcgtctcctccatccgcacctggagtcagagcgtggatttttgtatttgctcggtggtgcccagtctctgccccagaggctttggagttcaatcttgaaggggtgtctgggggaactttactgttgcaagttgtaaataatggttatttatatcctattttttctcaccccatctctctagaaacacctataaaggctattattgtgatcagttttgactaacgaggctgaatgctttgtatttgatgttggggctgaggggaagagattttgtctcctgaggagaatagtagacaggactctttatgttgtaggggtcggaaacgactcaaactgctttaaatataaaagaatttatggctgggtgcagtggctcacggctgtaatcccactgaaccactgagtgagatcagtgctgaagcaggaggattgcttgaggctgggagttggagagcagctgggcaacacagcgagacccctatacgaaaaattaaaacaaaattagccaggcctggtggcgcacctgtagttctacatacttgtgaggctgaggccgggaggatcgcctcagctcaggagtttgaggctgcagtgagctatgatcacaccactgcactaaagcctgggcaatacagcaagatcctgtctctttaaaaaaaaatgtattagtggccgggcgtggtggctcacccctgtaatcccagcactttgggaggctgaggtgggtggatcacctgaggtcgggagttggagactagcctggccagcatggcagaacctcatctctactaaaaaatacaaaaattagctgggtgcagcggcaggcacctgtaatctcagctactcaggaggctgagaactgcttgaactcgggaagtggaggttgcagtgagccgagattgtgccattgcattctagccttggagacagaacaagactctgtctcaaaaaaaacaaaaacaaaaaacgcattagctcataaaatggaaaaatcctaggggtagatatggtttccagcagcaatggactggggctcttggtctttctccagttgcctcttcttaccccttgattgatttcactgtggggaatctctcattggccctggctcgttggtaggccctcctaaaccagtctccaggcagtatggcttcctctgatttggccaggcttgcttattgcctgttgtgtggtagggagtgacgtcagcctgcccagatcacatggaatatataggtgatggggtgtccctgctcccctcagatcagtttgttcccagaaatgagtactgtgtcaggcaggcaaactgacagaccatcttacaagaaataaggaaactccttagtctgaaagcaggtaacctcagacagtaattcaaatttacaccaaaaaccaaagagcaggctgggtgcggtggctcatgcctgtaatcccagcactttgggaagctgaggcgggtggatcacctgaagtcaggagtttgagaccagtctggccacatggtgaaaccctgtctctactaaaaatacaaaaattagccaggcatggtggcgggtacctgtaatcccagctacttgggaggctgaggcaggagaatcaattgaacctgggaggcggaggttgcagtgagccgagatcactccattgcactccagcctgggtgacagagtgagactctgtctcaaaaaaaaaaaaaaaaaaagcacccgtgacagtaattatgtaattataaggattacagtgggctgggagcggtggctcacgcctataatcccagcactttgggaggcctaggcgggcgtatcacctgaggtcaggagttcgagaccagcctggccaacatggtgaaaccctgtctctacttaaaatacaaaacattagccgggcatggtggtacgcatctgtaatctcagctactcgggaggctgaggcaggagaatcgcttgaacctgggagatggaggttgcagtgagccgagatcgcaccattgtattccagcctgggggacaagagtgagacttcatctcaaaaaaaaaaaagattatggtagccctccgtaatccttgaagcatacgttccaagactcacagtggatgcctgaagctgctgatagtaccgaatgcaatctgaacacatttctgtttatgtcttctacctacaagctgaatgcctttcccatcttgactgagcatttatcacaccctgtggccttggaaactttggcagtttgaggtatgacagtgaaactagcatgaatttccttctctttcttcacaatttgatggctagaatattcaccttttttttttttttttttttttttttttttttttttgagacagagtttcactcttgttgcccaggttggagtgcagtgatgcaatcttggctcactgcaacctccgcctcctgggttcaagcaattctcctgtctcagcctcccaagtagctgggattacaggcatgcgccaccacacccggctaattttgtatttttagtagagatggggtttctccatgttggtcagcctggtcttgaactcctgacctcaggtgatccgcctgcctcggtctcccaaagtgctgggattacaggcatgagccaccgagcctggcctagaagattcatcttaaggccaggcatggtggctcacacctgtaattccagaattttgggaagttgaggcaggagactcacttgagcccaggagttcgagaccagcatgggcaacatggcaaaaccctatctctacaaaaaaaattgaaaaaatcagccaagtgtggtgtcattcacccgtagtcccagctacttgggaggctgagctgggaggattgcttgagcctaggtggttgaggctgcagtgagctgtggtggtgccactgtactccaccctgggtggcagagtgagactgtgtctcaaaaaaataaaataaaaagggctggtcacaatggctcatgcctgtaatcccagcacttttggaggccaaggtgtgtggatcacctgaggtcaggagtttgagaccagcctgaccaatatggtgaaaccctgtctctactaaaaatacaaaaactagctgggcatggtggcaggcacctgtagtcccagttacttgggaggctgagacaggagaatcgcttgaacccgggaggtggaggttgcagtgagccgagatcatgccactgcactccagcctgggtgacagagcgagactccatctcagaaaaaaaaaaaggaaatagctgaggcttctgaggctttgtaatttataaagaaaagaggtttattttggctcatggctctgtaggctatacaggaagcacagtgctggcatctgcttctgctgaggcctcaggaagcttccaatcatgatacaaggtgaagggggagcaagcacatcacatggcaagggagggagtgagaggggggtgccaggctcttttatttatttatttatttggtacagagcctccctctgttgctcaggctgaagtgcagtggcacaatctcggctcactgcaacctccacctcccagattcaagcaattcccctgtttcagccccccaagtagctgggactacaggtgtgtgccaccataccagctaattttttttggcatttttagtagagacagggtttcaccactttggccaggctggtctcgaactcctgacctcaagcaatctgcctgccttggctttccgaagttctgggattacagaagtgagctaccacgcccagtctcaggctctttttttttttttttttttttttttttgagacagagtcttgctctgtcacccaagctgtagtgcagtggcacgatgatcttggctcactgcaagctccgcctcctggattcatccattctccatctcaggctcttttaaacaaccagctctcgagggaacaagggaactcacagagcgagaactcactcattactgtggggagggcaccaagaccttcttgagggtttcgcttcgaaacacctcccaccaggcccacctccaacattggcggtcatttcaacatgagatttggaggggaaaaatatccacaccaaatcaatacccatataagaagccagaggctgggcacggtggctcatgcctgtaatctcaacactttgggaggctgaggcgggtggatcacttgaggccaggaatttgagaccaacctgaccgacatggtgaaaccaaccccgtctctacaaaaacatacaaaaattagccagacatagtggcgctcacctgtaatcccagttacttgggtggtggaggcacaaaaatcgcttgaccccaggaggcagaggttgaagttagccgagatcgtgccaatacactccagcatgggtgacagagcaagactctgtctcaaaaaaaaaaaaaaaaaatggccaggcgcggtgggtcacagtggcggaccacctgaggtcaggagttcaagacgagcttggccaatgtggtgaaaccccatctctacaaaaatacaaaaattagctgggcatgatggcagtgcctgtaatcccagctactcaggaggctgaggtgggataattgcttgaacctgagaggtgggggttgcggtgagctgagattgtgccattgcactccagcctgggtgacagagcaagactccgtctcaaaaaaaaaaaaaaaaaaaaaagccagagagctagctggctctcttcctgccatgtgaggctgcaagaagttggtggtctgcaacttgcaagaggtccctccctagaacccaaccttctggcaccgtgatcacagacttccaatctccagacctatgagaaataaatgtttaagccagtttatagtattttttttaataacagcctgagccaactaagagagttgggttttgctgcaataacaaatttccctcaaatcttactgacttacacaatcacaggtttcttttttgttcatggcacacatccaggccaccaggcttttcgtttttgttcaagagacatagtcttgctcttgttctgtcacccagtctagagtgcagtggtgtgatcatagctcatggcagcctcagtcttctgggctcaagtgatcctcctgcctcagcctcctgagtagctggaactgtgggtgcataccagcatacctagctaagtttcaagttttttgtagagaggggttcctggtatgttgtccagtctggtcttgaacccctgggctcaagcagtccccctgggctcaagcagtcctcttggtttggtctccagaagtgctgcaattacaggcagggttttaccatgttggccaggctgatcgtgaactcctgacctcaggtgatccaccggcttgctctcccaaagtgttggaattaccggcgtgagccaccgctccccatcaggggcttttttttttttttttttttttaaatcagtctctaacactggaacacttttctgcttcggaagtaaaaccatcaggctgttagacacagacacccctctcttggcttccttcaaattactgaaaacaagtctctccaccccctaccgtaccaaccaaccaaccaaagactggccagcacatgctgtagtctcagaactttgggaggccaaggtgggaggattgcttgagcctaggaggtcgaggctgcagtgagctgtgattgcaccactgtgctccagcctgggtgacagagtgacagcctgtcctcccaaaaaataaaaaaatgttttaaaaagtacatgtctgatgtgcttacaaaaaataaaagaagatccttggttaatggccctgccccttactccaaggccatatttgctgtgctcactgtctgggctctagtcctgctgcctccagctaactcctcctttacctggctaaccctttgtctctttattaatgccataaacatttattgagcacctactacatgccagatcttattctgggagctgggaatacagcagtaaacaagacggacaagaccccatccttgaggagctcacagcttgacattccttctcaaagtggttaagccccaggatgctggagcctgacgggttgagtttgaatcccagctctgccatttaactagctgtgggcaaatgtttagcgcctagtactgtaataaatgtgaactctcagccgggcgcagtggctcacgcatgtaatcccagtagtttgggaggctgaggcgggtgggtcacttgaggctaggagttcgagcctggccaacatagtgaaaccccatctccactgaaaacacaaacactagctgggtgtggtggcgggcacctgtaattccagctacttgggaggatgaggcaggagaatctcttgaatccagaaggctgaggttgcagtgagctgagatcatgccactgcactccagcctgggccagagtgagactgttgccgtggtgctcatcatcagtctccagatgtcagttgtccccttttctagtgagccgtctctgattgcagcaggctgactgaacctattctgggatcccacagctcctgggctccctcatccctgccctgaacgctctgggctgtagccctttggtaatgggtatgtgtcccctactggacagggagcctggtgagggcagggaccagggctttcctgatgcctgctctgtccccaaattcacccagcagagaagtgtgcacgcagcaggcactcagtacacatatgctgaacacctgagtgtcaccgacagctgcggaggcactggggcaatctgtgtgtttctcagcctggcgtcgggggttaagggggcgggaattactcggcgaggtcgggaggtcgcgcggtggaacccgggggccaggtggaactcggtgtaacagagcccccagtggtcgcgccgcgtctcagaacccggtgcgggagacgctctccccgcccaaagagggaaggcgggcgggactccccaaccggcttgccccggtccccctgggccccatgaataaccaggcgcggaccccagccccctcctcggcgcggacttcaacctcagtccgggcttctaccccgacccggacaccgactccactccggaccccgactccggtccggactcggacccccatccggaccctgactccagtcctgactccgtctccagccgggacttcccctctggtcctgactcctgctccagcccagattcccactctggtccccactcccgctctggcccggatcccccgtctggttccgcctcctgctccggcctggatccctactccggtgccgactcccgttcccgtccggaacccaactccggtcccgactccggctcggaccctgactcctccagtccgggtcccagccccagccccagcccagctcctggcagggattcgggccgcgctccccgtcttggactcctacctggccccggccctacctttggatccgcccccggaacctgctccggagctgcctttgttgcccgaggaggaccctgagccggcgccgagcctgaagctcatcccgtcggtctccagcgaggccgggcccgccccggggccccttcccacgcgcaccccgctggccgcgaactcacccgggcccaccctggacttcaccttcagggcagacccgtcggccatcgggctggcggatccccccattcccagtcctgtcccctcgcccatcctggggaccatcccgtcggccatctccttacagaattgtacggaaaccttcccctcctccagcgagaacttcgcgctggacaagagggtcctgattcgagtgacctactggtgaggacctcacacatgcctctcccaacccccggggacagggccggcagtgggggctgggtctccggggacgtggaggtcagggttggggtagggcgaggggagggattcaggaagagccccagagttccagttcccagattggaaacccgctcttgtctctcattctctttggggcaggagagcttcaggttcaaatccctgctttggatctgagcttcattcattcgtttctgagtgccccgcgggccaagtgccaggcctgtgctagagatggggtgctgagtagagcagatcgatctactttgctccccagcaagaccaacccaaagacaccgcacatgataggggctctggcttcccttcccagcctctctcctgccctggaagcctctctggccccttgtctctctctctctctctcacttcctcctcttctgtctctgcccacaggcggtctctcccactctctgtctctctgtctccccacctcactctctctctcttttgtttttgtttgtgtttcggacaggtcttgctttactgcccaggctggagtgcagtggtgcaatcactgctcactgcagcctcgacctccagggctcaagcgatcttcccacctcagcctcctgagtagctgggactacaggtgtgcaccaccatgcctgcctaattttttttttttttttttgagacggagtttcactcttgttgcccaggctggagtgcaatggcgcgacctctgctcactgcaacctctgcctcccgggttcaagcaattctcctgcctcagcctcccgaacagctggaaccacaggcatgtgccaccacgcccggctaattttgtatttttttttagtagagacggggtttcaccatgttggccaggctggtctcgatcttctgacctcgtgatccacccaccttggcctcccaaagtgctgggattataggtgtgagccaccgcgcctggcccctaatttttaaattttgttgtagagatggggtcggggatggggtgcgggggcagtatcactatgttgcccaggctgttcttgaactcctacattcaagcagtcctcctgcctcagcctcccaaagatctgggattacaggtgtgagccaccgtgcccagcctgtgtctttcctttcccagagtgttgtgtgtttctgcttctccctatctcggttccctcacctctggcctctttctttctctccatcttatcttttctgtctctttctctgactccatggattcgtgtattcatgtattcattcgacaactacttcttcaccacccaccatgttccaggtcctattggcatcagggacacagcagtgaacaagaccgagatccccgtccttgtggctcccatgggctggtgtggaggggcaagcaaaaaaacaataatatgacctgtagaaaatgatctcatatgtgaggaggtgatccgtactgtgaacaaaaggcattttggggggttgcagttttagctggggtggtcaggaaggcctcactgagaagggggtatatgagcgaagccctgaaggaaggagagaaggagttgtgtggatgctgtggggagagcatttggctgagggaactgccagtgcaaaggtcctgaggcagggcatacctggggtattgaaagatgagctaggggcagggcctataatcccagcactttgggaggccaaggtgagtggatcacttgaggccaggtgttgaagaccagcctgggcaacacggcaacatggtgaaaccctgtctctataaaaaatttcaaaaattagctgggtgtgatggtgcatgcctgtaatcccggctacttgggaagctgaagtgggagaattgctagaacccaggaggtggaaggttgcagtgagccgagatcgcaccactgctctccagcctgggcgacagagcaagactctgtctcaaaaaaaaaaaaaaaaaaaaaaaaaaagcccagcgcggtggctcacgcctgtaattccagcactttgggaggccgaggtgggtggatcacgaggtcaggaaatcaaaaccatcctggccaacatggtgaaacccggtctctactaaaatataaaaaattacccgggcgtggtggtgggcgcctatagtcccagctactagggaggctgaggcaggagaatggcgtgaacccgggaggcggagcttgcagtgagctgagatcgcgccattgcactccagcctgggcaacagagcgagactccgtctcaaaaaaacaaaaaaacaaaaaaacaaaaaaaaaagagagagagagagaaagaaagatgagctaggggcttctgtggctggcacagggtgaatgaattggggagaagtgggagaagatggagacagaggggtgagaaggcagatcctgtggtggcttgcaggccacgggaaggactggtttttcccctgcgtgagatggcactacttcgggattctgaacaggggaggaacatgatctaactcaggtgttcatagggtgccctgagctggggaagatactgatgcggtgtcttccctggtctctctcttaactttctcctcctgctcttggcctccagtggcctctgaagctatagccttcgggtgagtagttttggctttggaggtagggggagcctgaggcaggaagactgggaggagtccctgtttcccctcccctgcaaccccatgaccccatctcctcccctcagtacattctactgaaaaagagcctggagcagcaatttccgaatcacctactctttgtaagtgtgtgggggtcctgggggagaggggggtggtcagggatctgagatccccaaggggcttggaggagagagcttagcctcccctacgctcaccatttcctcccaggaggaggacagagctgcccaggctacaggggagtttgaggtgtttgtgaacgggagactggtccattccaagaaggtgatcctgagtaaaggtccgggacagggaggtggggtggtgctgaggtcctgggggtgggagacctgtgtgctttcttccctctgtgcccagaggggtgatggctttgtgaacgagtccaggctgcagaaaattgtgagcgttatcgatgaggaaatcaagaaaaggtagccggcaaggggtggagctggaggtgagcgtggagctcccaaggctgcggtgggaggggtggaggccgggtaggaggatggggcagggctctgtctcagtcctgatcctagctcagccggttctcactgttagaatcatgacaagtcacctacattcttttctgagcctcagttgcctcatctgtaagaccctggggtaggactgtgttcagtgagtttgaaaaatagcaaggaggcagggcacaagtctagcactttggatggctaaaatggcagatcacttgagcccaggagttcgagaccagccagagcaacataatgagactctgtctctacaaaaaataataaataaataaataaataaataaattagccaggcacagtggctcacgcctgtaatcccagccctttgaaagcctgaggtgggtggattgcttgagcccaggagttagaggctgcaatgagctctgactgggccactgcactctagcttgggtgacagagcaagaccctgtctctacaagaaaaaaaaaaagtgccgggcgggatggctcacccctgtaatcccagcactttgggaggccgaggcgggcgggtcacgaggtcaggagatcgagaccatcctggctaacacggtgaaaccttgtctgtactaaaaatacaaaaaattagccaggcgtggtggcgggtgcctgtagtcccagctactcagaaggctgaggcaggagaatggcgtgaacctgagaggcggagcttgcagtgagctgagatggcgccactgcactccagcctgggcgacagagcgagactctgtctcaaaaaaaaaaaaaaaaaaaaaaggaaaagaaaaaatagtgaggaaactagaatgggcattgtagtccatggaaacagtataactgcctgaggcatggtagaccctatataaacacttatttttatatggagctgtcattgttattgttatttaaaattcttttctttctctcccatcttaggagtctcagctggatgatgagaagggctgaaatgttgccaagtcaggtccttttctgatggtggctggggctggggtgagctcagggaggggaagaggagaatacatgcagagtcagcacccctgtgtccagtctgactgtgtctgctgtcgccacactcacctctgaggtctgtggaagtcacctgatattctggccccaggggtgggagggaggggagcttggaaggctagtcctgtagctccagtcctctgtctggcctccactcctcttgctcctgagggcagtttgtttcttttgtggattcgtcatttcccatgccctggttccagatacattttgaaaaccttccatcttattggcattttctggggttgtgagggaaacggggatggcagtcagactcaaacccgtgacactccaaactcgattatgctccagggcccactttctaaacctgtaagatctatgttccagcctgcgcaacatagtgagaccccaactctacaaaaaataaaaaattagccaggtgtggtggtgtgtgcctgtggtcccagctatttgggaggctgaggcaggaggatggcttgagcccaggaggctgcagtgagccatgattatgccactgtattgcagcctggacaacagagtgagatcctgtttcaagaaaaaaaaaaaaaaggaaaaaaacccataggttttagaatgccagtgttgtagggagcgtctctgtgacctggggctggaggagaggcattttcacattcattggacatttatgggctccgtactctgcacctggcatggtggggtcagtggtcacatgccaggaggtcaagggcaaaggcagggggggctcagactttaccacttagttgctgtgtgaccaccaccaagggacgccacctctctgagcctccatttcctcctccataaaatagacgtcatagcactatttaacttgtggaatttttgtgataattacatactaaattatgcttgggaaaggattagcagaaggcttatcacagaattagtaagtttcagttagtagtagatttcagttaagagtgcttttgcctactagtaacagcagacttgactgccaatggctcacacagcagacttgactgccaatggctcacacagtagaaaacacaaattctgttttgtttgttttttgagatggagtctggctctgtcacccaggctggagtgcaatagcacaatcttggcttactgtaacctctgcctccctgggtttaagcaattctcctgcctcagcttcccgaatagctgggattacaggcatgcaccaccacacccacctaatttttgtatttttagtagagatggggttttgccatgttggacaggctgatctcgaacgcctgacctcaagtgatccgcccacctcagcctcactgctgggattagaggcgtgagccacctcaggcctgatgttttcaacacctgacaggataatgtgctggccctgtacatacaaatgatatgctggtgtgagtaggaaataagttatctatcatgcctgctaagacagagtgctggagggtaggggaaagtcccaaaacatatatggggtttgtctcagtgaaatctgtatgtgtcaagcagtataaaacatgagaggatatttcctatgtgaaagatactttccaccccctacagttagggatttgttttttttttttgagacaagagtctcgctctgtcacccaggctggagcgtagtggcatgatctcagttcactgcagccttgaactcctgggctcaagcaatgctcccacgtcagcctcccaagtagctggggttacaggcacgtgcgaccatgccaggctaacgatttttttttttttgagacagagtctcactctgcccccaggctggagggcagtggcgcgatctcagatcactgcaacctctgcctcctgagttcaagccattctcctgcctcagcctcctgagtagctgggattacaggcgcgccccaccatgctcggctgatttttgtatttttaatagagaaggagtttcgccatgttggtcaggctggtttcgaactcctgacctcgtgatctgtctgcctcggcttcccaaagtgctgggatttcaggcgtgagccactgcaccaggcaggctaatgatttttgtatttttagtagagacgggggtctcctcatgttgcccaggctggtcttgaactcctgggctcaagcaatacacctgccttggccttcggaagtgctgggttacagacatgagccaccatgcctggccaggggtttgctttaatcacacttttatgaacttggtgacaccaccctggttcagaacgcctaacatacctcataaaatatttttattttttatttttttgagacggagtctcgccctgtcacccaggctggaatgcagtggtgcgatcttggctcactgcaacctctgcctccctggttcaagtgattctcctacctcagcctccagagtagccaggattacaggcacccgccaccacgcccggctaattttttgtatctttagtagagagggggtttcaccatgttggccaggctggtctccaactcctgaccttgtgatccgcccacctcagcctcccaaagtgctgggattacaggtgtgagccactgctcccggcctaaaatattttaaaaatatttttaatgcaaaattgagctggtgggaaggtaagggaactcctggagtccagaaatctcacagaaatataaatccaaaagtggttggtgttggagttggtacttgctgtgaggaaatctgctaattttgatggcaagaacctgcatgactcaaaatgtaaagggaaaagacagaacccaaggcccaagcgggatgagatgccagagtggagaccatgtggatgccgggaaccccaggaggcagtaccctccagtgggtaggctgggaaaaaatgcccctctcacagaggtaggcagttggggtgattagcagtctccaccttgttagtgagcaaatgattgaaagaaagccttctgttaataagcctgcactcacacaaatttgggacctaaattcctgccatctgacaagtctgaaatttcatctaaattaatgtctggttaggaatgttcccaagtatgtgttatgattaaacagaagtcaactaagaagatgctgaaccatttcccaggtagttcccaaagataatattttgaggaacatgagttagcaattaaaaggagccaggcatggtggcttacacctgtaatcctagcacttagggaggcagaggcgggaggatgacttgaggccaggagttcaagactggcctgggcaacatagggaaaccctgtctctacaaaaaatacaaaaattagcccagcatggtggcattcgcttgtagtcccagctactcaggaagctgaggctggaggattgcttgagcccaggaggtcgaggctgcggtgagccatgattgagccatgattgtgccaccgcattccagcctgggcgacagatcgagagaccctgtctcaataaaggaaaaaaaaaagtcctggcgcagtggctcacgcttgtaatcccagcactttgggaggccgagatgggcggatcatgaggtcaggagatcgagaccatcctgactaacatggtgaaaccccgtctctactaaaaaaaagaaatacaaaaaattagctgggcgtggtggtgggcacctgtagtcccagctactccggaggctgaggcaggagaacggcatgaacccgggaggcggagcttgcagtgagctgagattgcgccactgccctccagcctgggggacaaagcgagactcatctcaaaaaaaaaaaggaaaaaaaaattgtcgttaacataaaagtcattaaagtaaaaaacagtattagatattgtcgtatagtagagaatttagttggcctttgtgtccagttgctgggagggactctttaaatccttggcatttcccaagtgacaggggtgcaccgttaacatggtggaccccttgggccatacttgatagtttttttgttttttttttttcggaaatggagtctcactctgtttcccaggttggagtgcggtggcacgatctcggctcattgcaacctccacctcctgagttcaagcgattctctttcctcagcctcccgagtagctgggactacaggtgcacgccgccacgcccagctaattttttttttttttgtattttagtacagatggggtttcactgtgttgctcaggctggtctcgaactcctgacttcaggcaatccgcctgccttggcctcccaaagtgccagaattacaggtgtgagccaccaccggcccatatttgatagtttagactcaaaaggtgactaacggtgcacttccacttcttgtttatggtaattaggtgaatcagaatggcagctgtcagtgacagaagggccaccatgagcttatgagaaagctggactttgagccacgtggtatcagcttgacagtctgggaggggaaggaagctggagattgagtttcagttccatgaccaatgatccagtcaatcacgcctgcataataaaaccccaataggccgggtgcagtggctcatgcctgtaatcccagtactgtgggaggctgaggtgggcggatcatctgaggtcaggcgttggagaccagcctggccaacagggtgaaaccccgcctctactaaaaatacaaaaattagctgggcatggtggcacatgcctgtaatcacagctactcgggaggctgaggcaggagaatcacttgaacctgggaggtggaggttaaagtaagccgagataaggccattgcaccccagcctgggtgacagagcaagactccgtctcagaaaaaaaataaatgaaaaccccccaaaaaaactttgtgcacgcaggcccagatagctttcccagctaggaatactctgcgtatcaccacaaatccatgtgccagaaaactgatgtgtcctgcctccacagggagaggacgtggaaactgtgcactgggaccatcccagacctcgccatgtgtgtgtttctttcttggctaatcttgatttttatctttttttttcttttttttttgctataataaaactataaaatcatagcactttccccagttctgtgagtcactctagtgaattattgaccctgaaggaggagtgggaaccccctgaatttgtagcctgttggtcaggagtaaggaggtctgggaaccccagagcttgtggctggtgtctggagtgaggacagccttgtggaagactgagtccttaaacctgtgaagacgaatattcactcctagtgtcagaattgcatcgtagacatgaagtagtaactacagaataataaacattttaattgggcaggaggatggtacaattctaaactgtatgtacctattaacagcttcaaaatacgttaagcagcagggcgggcgcggtggctcacgcctgtaatcccagcactttgggaagctgaggcgggctgatcacgaggtcaggaaatcgagaccatcctggctaacacggtgaaactccatctctactataaaaaaaaatacaaaaaattagctgggcgtggtggggggcgcctgtagtcccagctacctgggaggctgaagcaggagaatggcgtgaacctgggaggcggagcttgcacgtgagtcgagatcgcgccactgcactccagcctgggtgacactgcaagactccgtctcaaaaaacaaacaaacaaacaaacaaaaattagccgggcctggtggtgcgcgcccgtaatcccagctactcgggaggctgagataggagaatcgcttgaacccaggagggggaggttgcagtgagccgagatcgcaccagtgcactccagcttgggcaacagagtgagactccgtctcaaaaacaaaacaaaacaaaaacaaaatacattaagcaaaagttgagaaaactatagatcatattataatgtgaaattgtcaaatacacctaaattagagacaggtgaaactgacaaaaaataattcaggatgtagaagagtgtgtagaacataaaccacaagcctgatctaatgaacaaatgtatataattgtatctaacaattggagaatacctttctgcacaaatgaaatatttacaaaatgtaacaatgtgttgtgccataaagcctccatacattttaaataatttgcgtcattcaaaccacattctctgaccactatgtacttaagtcagaaatcagtaacaaaagaaacataaaaatctgaacatcttcaggaattaagaaacacacttctttttttttttttctggcaaaataagccagaaagtgctacatcacccaggctggagtgcaatggtgcgatctcggttcactgcaacttccacctaccgggttcaagtgattctcctgcctcagcctcccgagtagcagggattacaggtgcgtgccaccacacctagctattttttgtatttttagtggaggcggggtttcaccatgttggccaggatggtctcgtactcctgacctcaggtgatccgcctgccttggcctcccaaagtgctgggattacaggcgtgagccactggacccggccttttttttttttttttgagacagtcttgctctgtcacccaggctggagtgcagtggtgggatcttggctcactgcaacctccacctcccaggttcaagcaatccttcctgcctcagcctcctgagtagcagggattacaggagtgccccaccacatccagctaatttttgtatttttagtagagacggggcttcgccatgttggccaggctggtcttggattcctgacctcaagtgattcacccgccttggcctcccaaagtgctgggattacaggcgtgagccacagcacctggcctgaaaatgctatattctaagtcagtagagaaatactaatactcagacaagtaccctacaaactctattgattttatctcacaggaaaaagaaaattatcaatgaactactctcccaaaaagcattagccctgaatggttttcagaataaaaatctgtgaaactttaaaaaccagataattccaatgccagctttttccagagcagggaaaaaataaaatacttctgtactcttcatatgaaatgatatatatgaaatacagttgatctaaatactgaaaaggttgataaactagaaactaatttcacttatgaattctaatacaaaatcttaaataaaattttattttattccataaaataaaatggaattcaatatcatactaaggaataatgtattatgtctaagtgaggggcatttcaaatgcaaggaccattactacaaaacctatgaacatgatttaacatatgaatatactgccgggcgaggtggctcatgcctgtaatcccagcactttgggaggccaaggcgggcggatcacctgaggtcaggagttcgagaccatcctagccaacatggtgaaaccccgcctctactaaaaatacaaaattagccaggtgtggtggtgcatgcctgtaatcccagctactcaggaggctgaggcaggagaattgctggaacctgggaggtggaggttgcggtgagtggaggttgtgccattgtactccagcctgggcaacgagagtgaaactccgtctcaaacaaaaaacaaaaaacatatgaatacatcatgggagaaaagagatccacaaacgcggatctgacctttaacaacattctctaccagttgggcgcactggctcacgcctgtaatcccagcactttgggaggctgaggcgggcagattgcctgaggtcaggagttccagaccagcctggccaacatggtgaagccctgtctctactaaaaatacagaaattagctgagtgtggtggtgggcgcctgtaatcccagctattcaggaggctgaggcaggagaatcgcttgaacctggggggcagaggttgcagtgagccgagatggtgccactgcactccagcctgggcgacagcgagactctgtctcaaaaaaaaaaaaaaaaaaaaaaaaaagaacgaggtaaaactattgttctttgtagatgatatgattgtataccaaagaaaagctactgcaaacaataagagaatagagtaagtttaatagagcaccaaaaaaaaaaaaaaaaagatagcattcaaatttacacaccataaaacctcatttacaatagccataaacaacaaacagaaaaccaaacaaaccttggaatatttttaacaaaaatatgcaagacctatatgaaggaaactttaaaatacatctggggacaaatgaaaagacttaccacattactggataggatgacatcgtgaggatgtcaattctcactcaacagtatatatattgaatgcaacctatataaaaatactaacagcttttgtaaaaattgaaactagtcaagatgatcctaaagttccacaatagaaaaaaaaaatcaaagaacagcctgaaaaactttggaaaagaagagcaatgagggtggactagcactactaggacctaaaacattccaaatgaataaaaattgtaatgttaacatttaaaacttaaaactattcatgagtgtggggggaaggtagggtgcaacctgaggcaaaaaaaaaaaaaaaaaaaaaaaaccaaacaaaaaaccagattccttcatgatcctgcagtggcaaagacctttcttttttttttttttttttttttttttgagatggagtctcgctctgtcaccaggctggagtgcaatggcatgatctcggctcactgcaacctctgcctcccgagtgcaagtgattctcctgcctcagcctcccaagtagctgggattgcaggtgcgcgccaccatgctcagctaatttttgtatttttaggagagatgagtttcaccatgttggccaggatggtctcgatctcttgaccttgcgatccgcccacctcgggctcccaaagtgctggcattacaggagtgagccacacccggccccatgactcaaagtctagaaaccgcaaaagaaataaactgaatatacacagctacattaaaaatttttttctctttttttttttttgagacggagtctggctgtgtcgcccaggctggagtgcagtggctcaatctaggcttactgcaagctccgcctcccgggttcacgccattctcctgcctcagcctcctgcatagctgggtctacaggcgcccgccaccacgcccggctaatttttgtattttcagtagagacggagtttcgccgtgttaggcaggatggtctcgatctcctgaccttgtgatccgcccgcctcggcctcccaaagtgctgggattacaggagtgagccaccacgcccacccaacatttttctgcatggcaaaaggatcacagcagtctgaactgctgtgaactatattccatgtcatcacaaagggctaacttctttagtgactgacacataacttacaagccaataaaaaataagaatatggacagatagttcgctgagaaatgaaaacaaatggctcttaagcatttgaaaacatgcgtcctcactcgtaattagagaaattcaaattaaaaccatagtgagaaaccatcttttactgtcagatgcttccaaagctgtcagattagccaggccgtggcgagaggcacaactatccctggctgaatggaaggtaaactggttgagccccaaggacagcactctggtgacacattaaaaataccaaggtggggccgggtgcggtggctcacgcctgtaatctcagcactttgggaggctgaggcaggtggatcacgaggtcaggagttcgagactagcctggccaacatggtgaaaccctttctctaaaaaaatacaaaaattagctgggcacagtggtgcacctgtagtcccagctactcggaggctgaggcagaatagcttgaacccgggaagtggaggttgcagtcagctgagatggtgccactgcactccagttcaggcgacagagtgagactccgtctcagaaaaaaaacaaaaacaaacaaaaaataaggtggctgggtgcggtggctcaaacctataatcccaacactttgggaggctgaggcaggcagatcttgaggtcaggagatcgagaccatcctggctaaccggtgaaaccctttctctactaaaaatacaaaaaattagccgggcatggtggcacgtgcctgtagttccaggtactccagaggctgaggcaggagaatcacttgaacccaggaggcagagattgcagtgagctgagattgcaccactgcactccagcctgggtgacagagcaagactctgtttcaaaaagaaaaaaaaaaaacagtgtattatggaaaacgagtaaacacgtataaatgcatagaaaatgttaaaacattttgcaaacaacccagatgtccaaaaggtgtctagttcattatactaagataaggctttacattgtagttgtaaaaaaaaaaacgcccagtggagtagctcacgcccagcacttagtactttgggaagccgaggcaggaggaacagttgaagccaagagttggagacaagcctagaaaacataatgaggccccatctctgtttctatatataaaaaaagaaaaaaaaaaccctgatatataaatctctccatatataactgaaaaaacccaagatgctgatagaggtatacaatatgttaccttgattttatatttttaaaaatttatacctcgtgatgcaagttaactaccttgatattaaaagggaaaatgcacaatatttagattgatgtttatttgcatatgcattagaaaacctgaaaggcgtacagtgaaaaagcaaaaaacaagcaaaaccaagaaaacaacaacaaaactccaagccacaagcaatggcacctgcatggaatagttctgagtttggcaaaggacagcaacaagagagatttctcacagcatcttttgatactttttttcttttttttgagacggagtcccactctgttgaccaggctggagtgcagtggcgtgatctcggcttactgcaacctccgcctcccaggttcaagtgattctcctgcctcagcctcccgagtagctgggactacaagcgcgtgccaccacacccagttaattttttatttttcgtagagatggggtttcaccatgttggccagggtggtcttgaattcctgacctcaggtgatccacccgccgtggcctcccaaagtgctgggattacaggcgtaagccagtgcgcccggccgatacttttttttgttgagtcttgtgaatagaatacatattctagaataaaataaaaagcttaaaattaacaaaaaacaagtttattccacacctacccaatttcacatagacttgaaaacactgatcatataatacgtggttttttctattgaatatttactgttcatctaaagtacctcagaaaacacaaatatgaatcttacactaggatttgttgacatgaccacaaattgtgaaatttcaaagtcctctcaatagccttccaatcctagtaactcaggtacacctggattcctgacaactctatttctttgttttctttcatcacttaggttcatttctatgggttctgttattggcattttttttttctcatatctttgcaaaaccatcctttatggtgaaagtcatgaaggattcttcacaaatgcaggaaaatgcattgctaacaaagtgctaagtcagaagtgtcttgggacctgtttgaaaacaagattcggccgggcgcggtggctcacgcctgtaaagtaatcccagcactttgggaggccgaagcgggaggatcgctcgggtccaagcgttcgggaccagcctagggatgcgagactcccttctctatttaaataatactaaaaaagaagaaagaaaacaagattcaacagtcttgtctgtttccatttcggagtgtgcttcctccttcaattgcacattgccgtattcccttccagtttgcattccccctaatgactgagttaactaaactggcacagcctgcctgttcttttgatcccaaaagggtcacttggctattccttgccaccaatgtcatcatcacagccgactcagtcggccagaggactgagggcctcggaggcagtcagcgctaccgtaaacgcgacagcagcgaagtccatctgcgggggatccgcgtcaaaggctgcttccctcgccttgcagccttccacaaacagcctgcggcgttcctcgaaatcccgtagtaatctgaccggaatcatggagctaccatccagatactcgcggaacaacagctgccggttaatttctaagaaagcgagctgctgatgggggtctggcgcggaggccaggcccgggacgctgctggggatgggcccgggcacagggcccggcatccgcgccatggaccgcgcagcttcggccactgggccttcccgagcctcctgcacccgaaccccgccgccgactgccccccgcagtacgtcgctgacgccactcgcggtgcccacctgtgggacactgctatctccggggagctcggacatctccaacagcccagtcggctccgccatagtcccagcgtttctacggagactggaataacggcactgcactgctgtatgcgagacctgcgcatgcgcgagtctcagtgagcgcgtaaacgctgtgcgtgccagagtgtgcgcatgcgtaagcacggtggccaatcctctagcgttccctagcggtcctgagtagccattacgtctgtagccgcctctggtcctctgagcgcctgaggacctgcggactgcgcggtatcttaaattacaaccacttcagtattaatgtaaagttccttatacggtcattttccagctcctgtcttttttttttttttttcagactgggtctcgccctgtcgcctaggctggagtgcagtggtgcgatctcggttactgctgctttgacctcccagcctcaagccatcctcctgcctcagcctctggagtaactggaactacaggtgcacacaaccacacccagctgattttttattttttgtagaaattgggtctcactatgttgcccaggctggtctcgaactcctggactcaagtgatcatcctgccttggcctcccaaagtgctgggattaccggcctgagccactcggcctggcctgtaagtaatattttgacactggaagtttgggggtttcccaaaaccacctttaggtttgataattcccagagctcattgaaatctgttatattcacagtcatgcttattacaggcaaaggacacagattagaagagatgtataaggcacaatctgggatggggagggttccaaatgtgaagttcctgtgttcctagggatgtgttaccctttgtcgtccatgtgtggcaataagtgtgggggtagtgctaacataggactctcacccaggctttggtgtccagagtttttactggggttttactacctaggcatgcttgattaaaccatcgtccattttgttgaagtcaatctccagcctcctacctgatatcacatggctccaagccccaactctctaatgatatggttagcctttctgtgtggctagctctgatcctgatgataacccaaaacgtgaaagtctatgttccatttaaaatcagtcagctgtggctgggtgtagtggctcatgcctgtaatcccagcaagttgggaggcaaaggtgggaggatcgcttgagcccatgagtttgagaccagcctgggcaacatagtgagacccctgtccctacagaaaaaaaaaattaggcaggcatggtggcatgtgcacctgtagtctcagctattcaggaggctgaggtgggaggatgacttgagcttggtaggtggactgtgcagtgagctatgattgcaccactgcactccagccctgtatgacagagcaagaccctgtctcgaaaaaaaatcctttgaatttagctggaatccaaatatgagagttgctggcaattgaacttcaggaggatccatctaaaaattctgacctatcacaggtcgtgtctgggagctgattgggttggaaatcattctgactcacgtgtaccttactttgtttctacagttctcttggagagatggagttctcctacatgtgacatatatgcttcaaaaagcacatttgtgatattccacagaagacaaaagaaaggacttctctggaaggtaacttcaaggggacaacaacagagctatggactgcaggaagatggcctgcttctcttccagtgtgatttggatcatggccattttgaagcctttgaactgggattagttgctgggctgggtcatcaggaacttgcgtgtccatctcagggagacctggccttcagaaatgacagcattcggccccaggaggagcctgcaattcggcctcagtcttcccagcgtgtgctgcccatggggatacaggacagtaaggagctaagcagaacctgctgcctgaatgggggaacctgcattggggtccttttgtgcctgccccccgtccttctatggatggaactgtgagcacgatgtgtgcaaagagaactgtgggtctgtgctccatgacacctggctgcccaagaagtgttccctgtgtaaatgctggcacggccagctctgctgctttcctcaggcattttactggctgtgatggccttgtgatggatgagcatctcatggcttccaggactccagaactaccaccgtctgcatgtaccacttttatgctagctggcatctgcctttctatacaaagttactattaattgacactgacctatttccagaaataccattttagatatcatgcaaatttcatgaccagtaaaagctgctgctacaatgaaagatgatcatttgttagtttacttaaaataatgagtatatttccaaaatggtctctaacatttccttacagtatcaacaacttcttacttctttgccctgccctctcccaaaaaacgacttcttttttcaaaagaaagtcagccatatctccactgcacccaagtccagtgtttctttctttttttgagatggagtctcgctctgtcacccaggctggagtgcagtggcacgatctcagctcactgcaacctctgcctcctgggttcaagcaattctcctgcctcagcctccccagtagctgggattacaggcatgtgccaccatgcacgactaacttttttgtatttttagtagagaccgaatttcaccatattggcgaggttggtcttaaactcctgaccttgtgatctgcctgccttagcctctcaaagtgctgggattacaggcgtgagcaactgctcaaggcctcgtgtttattgatacatgtaattctaccaaggtcttcttaatatgttcttttaaacgactgaattatatcttcagattattaaagactaatcttaatgtggaccttaggatacagttttgagtagagttgatcaaaatcaattaacattgtctctttaaaaggaaagacagcctctttaaggcgaggaaccagagtgatgaaggaatggaagtctgtctgcatgtgtgcagggagactgggtaagaaagaggaagcaaatgggagagagaggttggaaaacataaaataggttatttaactggtgattaggtgggtgtagagaagcaagttaaaaggctaaatggaagggcaagtttccatcatctaatgaaagatatataagacaaggactcccctttttttcctaaaggcattgtaaaaagaattgatttttagacggagtctcgctctgtcgccaggctggagtgcagtggcgcaatctcggctcactgcaacctctgcctcccaggttcaagtgattctcctgcctcagcctttgtaaaaagtctttttagaaaaaatattatacctcaatgtccccaacaaaattgcttaataaattatgcttcctccaagctatgcaattcttttaactgttgtagaagagaaaatgttcagtgtatttagttgtaaaccaagtgataaaaccacatattgtaaagctcatttaaaaaatacattgtatatatgtgtatgcacagtaaaaatggaaaatatattgaaaaaaaatttgatccttatattgtacctgagaataaatttcaaatggctcaaagattcaaatgtggacaatgaaaccacacacacacacacccaagactaccttaggattcaaaatactgcaggtttatttattttttattttttgagacaggatctcactttgtcacccatgctggagcttgctgggctcaaacgatccttctacctcagcccccagagtagatgggattagaggcttgtgccactacaccaggctaatttttcatatttttcatagagacagggtttcgccatgttgcccaggctggtcttgaactcctgagctcaagtggtctgcctgcctcagcctcccaaagtgtgggattactgatgtgagccactgtgcccggcctcctgcaaatttaaaggaaaataggcaacaaaaattaccatggccaaaggctttccaaaaagccaaaatctaatgacaacttgtgaaaaaatattcgtaactcatatcccaagctattatcatacctcatatcactaacatgagtatcataaatagctactggattcaatgaagaaaggacaaaattatctgggaggggaatggataaagaatatgaacaaggcatggtggctcacacctataatcccagaactttgggaggccaaggagggaggatcatctgaggtcaggagttggagactagactggccaacatggtgaaacccatgttaaaaatacaaaatgagccaggtgaagtggcatgtgcctgtaattcccgttatttgggaagctgaggcacgagaatcgcttgaacctgggaggcggaagttgcagtgagctgagatggtaccactgcactccagcctgggcgagagagtgagactttgtctaaaaaaaagagtatgaacagagagtttatggaaaagggaatatatatgactcttaaaagatatttaactggctgggtgcggttgctcacgcctataatcccaccactttgggaggccgaagtaggtggatcacctgaggtcaggagttcaaaaccagcctggccagcatagtgaaaccccatctctactaaaaatacaaattagccaggtgtgttggtgcatgcctgtaatcccagctcttgggaggctgaggcaggagaatcccttgagcctgggaggtggaggttgcagtgagccaagatcgcacaattgcactccagcctggacaacaagagtgaaactcccatctcaaaaaaaaaaaaaaatttaacttcgctcatcataaaagcgaattaaaactgatataccatttttcaactatcagattcgcaaaagccagatattattgatgatttagtgtgttggctgggctgtaacgaaacatctatgatcattaattgctggtgggagtgcaaagcaggacacatatagaatgctgcatagcaatattcataaaatctcaaaggagtaactttggcccagaattctcatttctggggcatcagcctacagatattacatgtaaaaaggaatctaggtagctattgatcatgagacacatcattagggctgggcgcggtggctcacacctgtaatcccagcactttgggaggccaaggtgggcagatcacaaggtcaagagatcaagaccatcctggccaacatggtgaaaccccgtctctactaaaaatacaaaaattgaccaggtgttgtggtgggcgcctgcagtcccagctactcaggaggctgaggcaggagaatcacttgaacctgggaggcggaggttgcagtgagccgagattgcgccactgcactccagcctggcgacagagtgagactccctcttaaaaaaaaaaaatcactagtttcgtgaaaacccaaggaaaaaatgatctattacagcatcaaatataagatgcacccacatttcagagatgttcaaatatgaagtgaattttgaattgaagcaatactatatttgtgcacatgccacatgatatacaagatgaactactctagcaattgtacaagatgaactactctagcaattttttattctgcccaaagaaagagatgggaaacaacctaaatgtccgtcaatatatccctggttaagtaaatttggacataacctcagaatggaataaaatgccactttaaaaaataatgaggaaatacagtggtttggaagggtcaacatatgttcttaatgagaaagcaatgtataaaccagtaaatataatatgccgacttctgtgaagaaataaaacaagtaaacccagatttatatgtgcctgtgtacacgtaaggaaactagaaggacggaaaggaaactgtggctattagaggtcatcgttggtactggatggaggaaaacaagaatggaaggcttttcgctgtatattttatatattttttggcttgtgaatagattttttaataccaaaaaaactttaaaaattaaaaattgaaagaaaaaagtccagaaatttgacgttcttgaaaacatgatttatcacataatatatacatttactttgcttgtcacttgaaatgcctaagaaaacacaaaatcaatcttaaactagaaacttctattgaatatgacatgaagagagcacatattccgacaatttcaagttcttttcatagccttccagtcctaataactcagcgttaacatcttattctgttcagcactatttgataatttctttcatcctcatgggctctagtattgatgtttcatcagtctcaattttataaaaccatcctttactttgtaataaagcaatgctgagagacattttccataatgcagggggaaaaatgtggatcaatcacaaactcaaagaacgttacagttataatgctttcgacatttttttctacttctgtgatgctttttcaagataagcttccccctccccctttttttcccctccacctgtgcactgtcttatcgcgatatactcttgacttctgaaaatcaagttgcaggattggtatgactggaatgcagaggttctcttgaagtagtgtcaccacataactattctctattgataaacttatcgcaaccaagttcttctatcagagggttgataacttcagaggcagtcagagctatcgtaaaggttaaaatatcgaggtccaccctgtgaggatttcgctgatattcggcatcaaacgctgcttcccttgctctgcaggcttccacgaatcgcctgcggcgttcttcaagctcttgtattctgccgggagcaatcgggtaattttccagatagtggcggagaaactgctggtaattgatgcctaaaacgctaagtgggtggcggagacggagatagggcaacgcagccaggcctccgttcccgtgtctggacctgggcctgccctcgggaccctcttcgtccactggctcccccagcaagcgggcgacctccgccatccgggcttccctggccgccgccgccgccgggctttccctgcccgccgcggctgccctggccaacgccgccgctgccaccggggctcccctggctgccgccgccggggctgccctggccgccgccatccgaccttccctggccgccggcaccgggcctcccctggccgccgccatcgcgccttccccggcctcctcaggctgtgccggggccggctcccgcctcccgcggcctacctccgcctgcgggacgtctctgtcaccattcgccgcgcctgtctgcgggacactgctgtctgcgggcagcttggacatctcagaccgtggggtcaactcggctgctcccagagaaactggaataactggacagagcgatgcccggcggacaccccagtgcgcgtgcgtgggcgctatgcgcgctgtaaatgcagtgtgcgtaaccgggcgcgagagcatagattcttaccgcaaaccctgggagcagtgcgcatgcgtactttcccggcgcccgccgttctccagatgccccctcgaggccgggaagcgccaacgcatctgaaacatcccaacgacgaagggcgggggacatttcaaccagtttgatgtttatgaggaacgcttacaagatcgcttcttgtaggcgttctcaaggttctgtcctagggtgtttctctttgttctccagtgattatgtgccacctctattatatatcaagatattttagattcatggtcttttctggatttttaaattgtttttcattcattcctttgcctgtcttcatccatacggatcgtcctagctaccaaagctttgtaattacagtcttttcgtgttatctttaacattgcattgactaccttggacatttgtttttcgaatcttatttgtgcaatataacatgcagaaaagtaaacaaaacataaatatacagctgaatgatttatcacaaagtgaacatccgtttaactaccacacagtccaagaagtggaatatttccagcatcccagaacccttcctcttcttcttatcactatcctttcctttctacgcagaagtaacaactatgctgatacttatggtaatcactttcttgtttttcttttcattttaccacctaagggtgcattcctaatgctgtagtttagtttggtttgtattctgaactttatctatgtgagaaacacactcacctgcgtaatttttgtatttttagtagagacgaggtttcaccatgttggccaggatggtctcgatctcttgacctcgtgatccgcctgcctcggcctcccaaagtgctgggattacaggcgtgagccactgcgccggccactttcttcccttttatgggctgaccccgcctctacattctgttcccttattgtgaccttctaggtggatgagccctgcagtttgttatatttgcaggctggctgccagtacttagatttatcatgcctcagaaatggaccatttaaaatgttttctcacatacacacttgtatctgtttttttgtgcattatttttatgagattcatccattcacattttctcttcctccctccctccctcactcccttccttccttccttccttcattccttctttctttcatctcattctgttacccagactggagtgcagtggcacaatcacagctcaacgtggcctcaaccttccgagctcaaataatcctcccacttcagtctcctgagtacctgggactacaggtgtacaccaccacacccagttaatttttaatttttttgtagagacagggtctccttatgttgcccaggctggtctcaaagtcctgggctcaaacgacccgcctgtctcagcctcccaaagtgctgggattatagggtgagccagagcactcggcctccagcctacattttcattatggtttataaatactttattttcttgatagttattatattcattaccattttttttatgaagtctcgctctgttgcccaagctgaagtacagtggtgtgatcttgggtcactgcaacctctgcctcccagttccagtgattctcctgcctcagcctcctgagtagctgggattacaggtgcgcgccaccatgcccggctaatttttgtatttttagtagagacagggttttattatattggccaggctggtctcgaactcctgacctcatgatccgccaggctttggcctcccaaagtgctgatattacaggcgtgaaccactgtgcccggcttattaccattcttttatggatcttgtaatattaaaacatgcatcttatatactgactctccaattaatttccctttgttctgattaatgtgaacaaacaaaataatttgatttgattttgctggtggtggtccccgtcatgatgccatgattcatgaccatcaacaaatgacttaagtgacttatcgttctctgccctatcagaagtagctattctgaggcagtaaggtctcatccacagagcacaagactgcattttaattttcctggtccaagcaccaaattaataaaacacaacagctagtctacttgctgcttcccaccagcatctctgcaatcactaagtgtgcggctcctttaaggcagctcccaggctaggctggagacagatctattgttctcaccctcaggctgcctggagagtcacaaatatttaacaaaggaagttccagacttaggtgacaacatatattatcacaggaagaagtagaaatcatagtaatttgctgtaatcctacagaagcggatataatcttgttctctggactaagagtcaccttacagcagaagctgaaaggccctctgattttctaagaatagaaattgctctaagtaaaatgatggtttattagatccggaagtgatataaaaatggttctaggaaaatgaagtgaactaaaataagaagctacaaatagaggaaggcagaaaaacttggtgataatgtgaggggatacaaacaaaaatttgagaggtagtccaggtttgctgttgctcccaagactgtgcctgcggtggctgcagcatctttgtaattcactgccactatttcgggatgacttgaggatgattgtaaccatgttgtagactaaaccattaaggcagctgggatcaggggctccatattgcttaaaatctttacagcagaggtgtgtgtgtgtgtgtgtgtgtgtgtgtgtgtgtgtgagagagagagagagagagagaatttgaatccaattaatatatatattttgagagagtctggctctgtcatccaggctggagtacagtggcgcgatatcttggttcactgcaacctccaccttccaggttcaagtgattctcctggagaatcccgccactgcactccagcctgggtgacacagtgagattctgtctagaaaaagaaaaaaaaaagacatagattcttggctgggcgtggtggctcatgcctgtaatctcagcactatgggaggccaagacaggaggactgctcgaggccaggatttccagaccaggcctgggcaacatagcaagaccctgtctctaaaagaagaaattagccagacatggtagtgtgtggctagctactcaggaagctgaagcaggaggatcatttgagcccaggagttcagggctacaatgagccatgattgtgccactgcactccagcttggatgacagagtaagactctgtctcaataataattagaaaaaagaagtagattttttttctccatcctttgaatgagaactggtttatgacttgtttgacccataagatgtggtagaaatgatggttcatcagtttcaagactagtgctcatgaggaatttcatacttctcattctctctctaactctataactcatctccaccatgaggacaagtctggaccagctttctggagggtggaagaccattcagagtggaggaatgtggtctcagacaaggcattcaaaatcagtcagtctggctgggctcagtggctcacgcctgtaaacccagcactttgagaggccgaggtgggcagatcacctgaggtcaggagtttgagaccagcccggccaacatggtgaaaccttgtctctcctaaaaaatacaaaaataagttgggcttgatggtgcgtgtctgtagtcccaggaggttgaggcaggagaatcgcttgaacccaggaggcaaaggcagtgagccaagattgcaccactgcactctggcctgggcaacaaagtaagactctgcctcaaaaaaaaaaaaaaaatcagtcagtccccagctgacctaccaactgactcttagatgcataggctcaataagtgcttcttgttttatgccacagtgtttgatatgatttgctatgcagtatcattgtggcaatagataactgttagctaacggttgcagaaattggtaccaggagctgggcactgccctaacaaaatcctcaagtatgtgccagtggccttggcactgcatagtggatgaaaggtagaaaatcacaaaggaaactgttagcaaagctgcagaatagtgagaaaattgttattggaggcagaaaaactggtgacctatgttatgatgtagtgaaacgattgctaaactatcgcccgaggttacttagaagatggaaagtatttctgatgaactgttgtatttggataagggaacctccagacataatgctggctgctcatgtggctgagtatgataatgcataccaagagtggggtgaactataggggttgactgattttctagaagaattcaggggaaatacagggggactatgacttgctaggatggaaaagaaaactttttctcacttccagtctctccacccacaattttttttttttttttagacagagtctcactcgctctgttgcccaggctggtatgcagtggggcaatcatgactcactgaagccttgaactccctgggcttaagtgatcctcccgcctcagcctcccaagtagctgggaccacaggcatgtgccaccatgcacagctaatttttaaaacatgttttgtagagatggggtcttgccgtattgcccaggcttatattgaactcctgggctcaagccatcctcccgccttggcctcccaaagtgctgggattataggcatgagccatcgtgcctagccacaaaagattatcaaggtgaaaaaaagcctgtgaatatggatcaaattaaaggtgtggccttctgaccctttgttatgactgttgaaaatacaaaggtagtgcttggtgaaaagccgaccagtcagacaaaagggtttctaggaagctttaagggcatgctccctcagaaaccagatcttaaaacaggaagaagttggtctagagagagagggtatttcttgaaaacaatagtgatgtggtttctggaggatggagtgaagtataagcagataaatagcaagcttacaaagtttgaaagggaattgtataggcaggactgccagcatagactttaaaattttttattatgtacttttttttttttttttgagacaggttctccctctgtcacccaggctggagtgtagtggcacaatctcagcctcgctgcagcctccgctcttcaggctcaagtgatcctcccacctcagcctcctgagtaactgggactacaggcatgtgccaccatgctcggctatttttttgtatttttaatagagatgaagttttgccatgttgcccaggctggtcttgaactcctgagctcaagcaatccacctgccttggcctcccaaagtgctgtgattataggtgtaagccactgtgcctggcccatttttaaattttaattcttggctgggtgtggtggctcatgcctataatcccagcactttgggaggttgaggcaggcagatcaccggaggtcaggagttcaagaccagcctggccaacatggtgaaaccccgtttttactaaaagtacaaaaattagccgggtgtggtggcacatatctgtaatcccagctactcaggaggctgagacaggagaatcgcttgaacctgggaggcggaggttgaggtgagccaagtttgtaccattgcactccagcctgggcgacagagtgagattttgcctcaaaaagaaaaaaaattaaattcttttagaggcagagtcttgcattgttgttcagactgaacacgaataatcagattgtttgtttccttgctattgagttgtttgagttccttataaactttggatattaacctattatcaaatgtatggtttgcaaatcttttctcccattccataggttgtcttttcacactattgattgattcatttgatgggcaaaagctttttagtttgatgtaatctcacttgtctatttttgcttttgctgcctgtgcttttggggttatatcaaaaaaaaaaaaaatagttcagatcaatgtcaatagcttttatcctaagttttcttctagtagttttacaggcttaggtcttatatttaattgtttaatccattgtgaattgatttttggatgtggtatgagatcagggtccaatttcattcttctacgtgtggactttccattttcccagcaccatttactaaagagattgtcctttccctattgtgtgttcttggcaactttgtcaaagatcaatggactctagatgtatgcatttatttctctcttctgttccatgggtctctgggtctgtttttatggcagtaccatgttgttttgattattctagatcatactgaagactctgactctgagtaggatggtatgactgatggaagatagtcgcaaattcttggacactcttccccttgatgggtggagtttagtctctctcctcttgaatctgggctggccttaggcagtcacttgtgatgaagaaaatgcagtgaaagcaacgctgtgtgacttcagagacgaggccaaaggcactcttgtagctctgagataggaggtgggacctgactccataggcggggcttggacactggaccagactgaagactaggtaaaacagggccgggcaaaagcagcttttaagcagacacacccatcagtgtaccatgtcaatttactgttgccatgacaacacccaggcgttaccacccctttccatagcaatgactcaatgattactaccccttccctagaaatttctgcataaaccgtcccttactctgcatgcaattaaaagtgcgtataaataggactgcaaacggcctgagcagctactctctagccctaccttgcaggagcagtcaccgagctgtaacatcgcctcttcaataaagctgttttcttctatctctggcttgcccttgaattctttcctgggcaaagccaagaacccagcgggctaagcaccactttggggctcctggccctgcatcagcttctgccttgctctcttctgccttgcctgctcttcagaccttctctcttgggttgcttcttctaggaacccggccctgtgaaaagcccaagccacagggaaggccacatcatgcgctcttacttttcttccaccttattggccactctcaccatcattgctgcatttattccagcactactctatgtcaaaaagctttacacacataaggtcatctaatcttcatctaatgatctctgttccacctataatcccttcttatatactttgtattgattttgcagaacatggaagcatatctctaatggacttcaagctctaaaggacatgaaattgtctccatccttcttctcttccccttgcttggtagcagttgaaggacacccaggatctcagctcaggggaaaacagaaggtcatactggagtctgagaacccttagtataaactctctaactcctggaaacactgttaagaattattgaaagcgtggaaataaggctggtctggaactcctgacttcaggtgattcgcctgccttggcctcctaaagtgctaggattacaggcgtgaaccactgcgcctctctggaatttgaccgtttatgctaaggcatgttgaggcagattttagcctcaggtcttccaggccaatggacccctcgcttctaaaagagttccagcgttgggttctgatcatgtcccagttttttgtttttttttttttaatagagacagggtcttgctatgttgttcaggctggtctcaaactcctggctcaagcgatctcccgcctcagcctctcaaagtgctgggattactggtatgagccactgtactcagtttatgtcccagtcttattggttcctgggggaggaaattgttggttccaggtgtagttagaggtcaaaacgttttctattttgcatgctcaggctacatgacttgcaattttggttctgttaaacctacaaggtaactttattattattattttttgagatggagtttcactcttgttgcccaggctggagtgcagtggtgcgatctcggctcactgcaacctccacctcctgggttccagcgattctcctgcctagccttccgagtagctgggattacaggcatgcgccaccacgcccaactaattttgtatttttagtagagtcaggggtttctccacattggtcaggctggtctcgaactcccaaacgcaggtgatctgcccgccgcagcctcccaaagtgctgggattacaggcgtgagccactgtgctcggccaacattttgttatcaacagaataggcccagtttgggctggtcccacagctacagcatcctttattcagtttatatatcctcaatttctcaaattttctttgagccagttttaccatcttgccagctccctgataaatgagttaaataagtctctgaaccatgggtcacattgtatttacatgagaattttttttaatttttaattttttttttgagacagagtctcactctgtcacccaggctggagtacagtggcatgatctcagctcactgcaacctctgcctcctgggttcaagtgattctcctgcctcagcttccccagtagctcatagctcaacctcctaaatagctgggattacagggatgtgccaacacccctggctaatttgtgtatttttagtagagatgggggtttcaccatgttggccaggctggtctcgaactcctgacctcaagtgatccacctgcctcagcctcccaaagcactgggagtataggtgtgagccactgtgcctggccagccttatacatgctaaagaacattacctgcttattatttctttatttgaagataaaatcaacttaggccaattcatcatttttttttcttttttgaccctgagtctcgctctgtcacccaggctgtagtgcagtggcactatctcggctcactacagcctctgcctctcaggttcaagtgattctcttgcctcagcctcctgagtagctaggattacaggccccagccaccttgcccggctaatttttgtattttcagtagagacggggtttcgccatgttggccaggccggtcttaaactcctgacctcaggtgatccgcctgccttggtctctcaaaagtgctgggattacaggcatgtgccactgcgtctggctcatcttttcttttagtgaaagaaataaaatgcaagaacagaacttatcctaaagttaaatcatcctagttcacaaaaggagcctgaaaatgatagaagcataaggtataggagaagtcctttcccctaagtcactgctgcaaacagatcctggaaataaatatttgcacataaacctctaagtagaggccatgatcagaacccaacactggaactcttttagaagcgatgggtccattggcctggaagacctttccctgcagtttgaagaggaataaataccacctcaaataaggtgatttgaaaaggtgttaaacaggcagggcgcaggggctcatgcctgtaattctggcactttgggaggctgaggcaggagactctttgaagccaggaatttgagacccacctgggctacacagccagactctgtttctacaaaaacacacaaaaattagccaggcatggtggtgcacacctgtgtggtctcagctactacataaggatgacaaataaaaggaataagttggctgggtacggtggctcacacctgtaattccagcactttgagaggctgaggtggcagattgcttgaacccaggagtctgagactggcttgggcaagatagcaagaccttgtccttattatttaaaaaaataaataaaaaagaaaagaattacctatggtatttttttttaattagaaaggcagccaacttccagaagaaaaataataaaataaaataaaataaaataaaagccaattaaatcccttgtaggggccaagggctttggtcctctcaaggttgctgacaaatcaatttgcaaagggcagattaattggagaaaaggcatacaaatttatttaacatgtatacacaagcactttcagattgaagactcaaagatacaggaaaaatggttcatttttacgcttaggtttgaaaccacttttgcatgaatgataacagtgagaaaattataacagtggaagagatctgatctaaccaatgcccatcttgcgattgtttttcttttggttttgttttcgagatgatgtcttgctgtctcctggtctggagtgcaaaggcacaatcatggctcactgcagcctcaatctggcgacactcccacctgagcctaccaagtagccaggactacaagtgggtgccaccatgcccggctaattaattttttttttttagtagagataatcttgatatgtttcccaggctgtttttgaactcttggcctttggcaatcctcccccagtctgcagtctgcctgctttggcctttaaggtgctagaattacaagtgtgagccactgtgctcggcctcctctccttttttgtggctatcttgacactgagtttttgcgtagtccaggccagttgttttgtataacatcccatacttctgggattgtctgattgttttttctttttttttttttgagacggagttttgctcttgttgcccaagctggagtgcaatggcatgatctcgctcactgcaacctccacctcccagcttcaagcgattctcctgcctcagcctcccgagtagctgggattacaggcatgcaccaccatgcctagctaattttttgtatttttagtagagacggggtttctccatgttggtcaggctggtctcaaactggcgacctcaggtgatccgcccgcttcagccttccaaagtgttgggattacaggcgtaagccacggcgcctggcgtctgattgcttccttatgattaaactgtcctttcccctaagtcactgctgcaaacaatttctggaaataaacatttgcacataaacctctaagtagaggccaggactcagccaggcgcagtggctcacgcctgtaatcccagcagtttgggaggccaaggcaggtggatcacttgaagtcaggagtttgagatcagtctggccaacatggtgaaaccctatctctattaaaagtagaaaaaaaaattagctgggcgtggtggcacatgcctgtaatcccaactactccggaggctgaggcaggagaattgcttgaacccgggaggcggaggttgcagtgagccaagaccgggccactgcactccagcctgggtggcagagtgagattccacctgtcaaaaaaaaaaaaaaaaaaaaaaaagaggccaggactcagagcatcctggtaacggttgtgcagaatccacactccagctgggaacactggggaaagtggagcccaccgttttctctctccttactgtcgggtcaggcttctgcccactagagggcagccaagtcaaaatcttgatagaaacaagttctaaagacttacccagatttgctatctcttctgagatagtgttttttttttctttttttttcctcttttttttttgaaataaggcctggctctgtcgctcaggctggagtgcagtggcacgatctcggctcacggcaacctttgcctcctgggctcaagctatccccctgcctcagcctcacgaatagctaggattacaaatgcatgccaccatgcccggctaatttttgtagagacggggtttcaccatgttgtccaggctggtcttgaactcctgggctcaagagatccacctgccttggcccccgaaagtgttgggattacaggcgtgagccatcaggggcggccttctgagattgttaatgtgaaaaattctatcgaagttgtctatcaaagttgtcatccaccatttgtctcttatgagtgttcttttttttgagatggagtcttgctctgtcgcccaggctggagtgcaatggtgcgatctcggctcactacaacctccacctcccaggttcaagcgattttcctgcctcagcctcacaagtagctgggattacaggctctcgccaccatgctggctaatttttgtattttcagtagaggtgggtttcactatcttggtcaagctggtctcgaactcctgacctcaggtgatccgcccacctttggcctcccaaagtgctgggattacaggtgtgagccaccgtgcctggcccttttgagtgttcttttgggaccctgtcagagcaacttactaagtacttcctctattgttaacttgttgagttgatgtctcctctgaaattttgtgtatattttgaggagatggactatttctagaggtctctccagaactgaaactgtggtttcctgtaagtctacgaatactgacttctcttttttttccctttgagacaaggtcttgttctgtcacccaggctggtgcaatcatgtctcactgcagcttcgacctcctgggctccactgatcctcctacctccgcctcctgagtagttgggacaataggcatatgccaccatgcctggctaattttttttgtttttggtatattttgtagagatggggttttgccatgttgcccaggttctgacttttaataaataagaaatttggtctctgtatctttcttttcccctttatacttcactgaagaaaatgaaggtgggcttcttcatggggctgggccagtaaaattaggctacactcatataagcatttccccaaatcctcctaatacctcttgtgaaaaagggtatctgccacataataccatcaattctgtgacaaattattctaacccgctggttctccatcctgtctgcacattgaaatcacaggggaatgacatctactgatgcccctgtctctctctcagagattctgagtggggagggaatttgtgttggtgtaagtgtgtgccccacaagggaaggacctgcccaacacaccgtgtgctttgccctcagcaaggagccacagctgcaggtggatttccacaccgggatggatgaggactcagacatcgctttccatttccgagtgcactttggtcattgtgtggccatgaacagccatgagtggggggtctggaagtgtgaggtgaaatctgacaatatgccctttgagggtggccaatcatttgacctgcgcatctgagtgctggacaaggaggaccaggtgagcaccccaggagctcccagcatgcagcctctgtggactcccagagcaggaggtagctctccctgccctggccccaccagtccctcgggacccatctcccataacgactcctgccccaggcttttcatcacagagcaccctctgcttgcactgccaccctcagctctttcccaaatctgaccaaggtcaaggttggttcacttgccatttcccccaaggtggagaatcatttccatagctgtcatttctgctcatgctgttatttacattttcatgtggccaaatagacaaaatacatgtatgaatcaaattattttagtcagtcaaaaattaactcttcctttcactcccgaacctcactcctactccccagaacaacactaccagcttctctgctctccttccagagataatctaccattagagaaccgtatatttcctcttcctcatttgtataatatgctttcattcctttttgtatatatgcctatacacatattcatatatacatatatgcatatatgctttcatttctttttaaacaaatgctgttataaatgtctttgtacattacactttggaaactagagtcgatttatagtcaaagaacatatcttggagaattcatctatctatggtgctgcttcatttttcttttttttttttttgagatggagtttcgctcttgttgctcaggctggagtgcaatggcgcaatctcagctcactgcaacctccacctcacaggtccaagcgattctcctgcctcagcctcccaagtagctgggattaaagagatgcaccaccacgcctggttaattttttgtatttttagtatagatggggtttctccatgttggtctggctggtctcgaactcctgaccttaggtaatctgcccgccttggcctcccaaagtgctggcattacaggcatgagccactgcgcttggcctgctgcttcattttttaaagattgcataatatgccagtagaaggatgatccaaaatgattgaacttgaccgttttgatggttactgcgtggtttttagtattttgctctcacaaagggtgctgtattaagctttctaatcaactcttttgtaattatcaacctaccaatacttacattggaggatacttgcaaagacataaaataattggttgaaaattgtgtgaaaaatcttaaaatttcataaattaatacctttaagatgactttcttcatagctacagcaatacagattatattgaaattttctcaccttctctaacgggtaggccaaaaggtgaacattttattcagctctaagtgaggcatctgttcatatgcctactataggctgctaaaataatatcctatgttttgcaacatctgtcctgttcctcctctctaagaacacttgggtttcattcttggccacctccagcccagatctgggctactccaaagagaaactgggccatcagcagtgaatgggagtcacagttggtggaacttaaaagtacccattcaataaacattgtcaagcactaacctcgtggcaggccctgtgcaagatgcaggaattcaaggtcaagagacacaatccctggccatggggatcttccaggctagaggggagatccagcaaacagggaccacgtgacatagaggggtagagcctcactggaagaatgagaggaaacattgaaaatgcagtgagcaactgtctcagatagccacaaaatgtagtctgtaaacagaagtgagtctgccgggttttgatgtataattaggagttttctgggtgggtgttgtaggtactagggcagagtagagaggaggctgaaagcttgtttggtgaaatactgtctttctgatgcacttttcctcttgcaggtaatggtaagtggccaacactgctacagctttgcccatcgactcctgccagggtctgtgaagatggtgcaagtgtggagaggtatccccctgacctcaatgtgtgtctgagattgaggtgatgaccacactccccactgtcgaggaatctctctttctacgtgaccatgcggttcccagagcctgctgacagcatgatccctccttactccttcccctacacttgctcattaaaacttcaccaaacttcacaggattttggcttttgcttgaaggggaaaaagcaaaagtggtcatcaccaagagggcctgaggggtttcatgggaggcatcaagaaatcaaagagaataaagcttcctgtggcacaaggagtgagtgacaaggtccctggaatgtctgacatgacattaggaacaacgtccatctatagcatgtagttgacttcagagactctgacccaaaatcctctgatttgggtcaaacccaaatcagagatttatctgacccattaatcctccttccttcttgccctttctccttctgccatgggatgatgtggcacaaaggccctggccagatcccagctctgtgctcatggattttccagcctccagaattgtaagccaaataaatgtttgtttgttataaatcatccagtttgttatagcagcacaatatggacttagatggtggtgaagcactgttgcaggcctggaggacagaaatcactggtatagggagaaattctacaagttgacccagaccctaccaggggcttacctccagcccagtgcctgaatatgctgaggcaagtgaaccaggaggaactgagaacagaatccaggcttcactggctgcctctgtgttggtgacagcagaaagacgagtatagggtggtggctgtgagatggcattgtgccatgggaagaagtagaccaagaagtgtttcctgggcactgaggagtgtcttctatctcatggtggcctctttaccagcacagctgaccagtgcatgggtccctctacctctcaagatacaggcacagtgataagaaatagtgcccatgtaggtcctggagaaaaaaaaagtcaaacccaagatatgtaacctccagaaatgactttggaagtgcctttatttatttatttattttcagatggagttttggtcttgttgcccaggctggagtgcaatggtgcgatctcacctaaccgcaacctccacctcccggattcaagcaactctcctgcctcagcctcctaagtagctgggattacaggcatgcaccaccacacctggctaattttgtatttttagtagagacagggtttctccatgttggccaggctggtcttgaactcccgacctcaggtgatccgcccacctcggcctcccaaagtgctgggattatagacgtgagccaccacgcctggcctagaagtgcctattttattgtgtccaacacttgacccctttacaaagctattataacagtgtggtgcttgcttaaggagaggcacatataccaatggaatataatagggagcccagaaataaacactcacatacacattcatgtgagagtccacagtaggccaagaccatctcactgggaaaggacagtcttttcaacacatgatgctgggaaaactggacttacacatgcaaaataatatggttggggcctttatcttataacatatacaaaaattaactcagaatgtatcacagaatacatgtaagacctacaacgataaaattctttgaaaaaaacatagacgcatatcttcatgacatgaaatttggcaatgatttcttggggatgactccaaaagcacaagtaacaaaggaaaaaacagataaactggactccctcaaaactgaaaacttcatcaaaggccattctggaaaaagtaaacagtcaactcacagaatggaagataatttgcagatcagatatctgataagagattattatctagaatagagaccttctacaatccaacaacaatggcacaaatactctcccgatttaacagtgaccaaataacttcaacagacatgtctccagaacagatataaaagtggccaataagcacatgaaaatatactcaacttcagagtcattagggaaatgcagaatcaaagccatagtgagatagcacttcactctccctaggatggctgttattttaagatgcaaaatcacaagtgttgtgaggatgtagagatactgtaacccttgaatgttgctgttgggagtgtaaaatggtgcagctgctgtggaaaactatatggcagttcctcaaaaaggtcaccatgtgatccagcaacagcacttctgagtatacaccctaaagaattgaagaaagagactcacgctgatatttgcacagcaatgttcatagcagcatgattcacaacaggcaagagatggaaacaaccccaatttccatctacagatatacgtacgatggaagattattagccttaaaagtggatgacattttgacgcttgctatcacgtgaatgagtctttaaaacatgctaagtgaaataagccagactccccctgaggctgtaggtgcaggctgtggggagaaggtaacggggcaggagtaggggctatggacatttggacccttcctcctgcagctttcttgtgccttcaggacctgtgtaagcctgatctctctgcccagtgagtccccacttccatcctgaggctatttggtcagtgtcaggttgcaaaagacacacaaccatgaaatgtgacttgacagatactctgcagtactttcactttcagatagctctggctgaacttgcaacctaaatacaaataggattttgtttccttttcactgctagttatgattttcaagaaatccatggtttagaggaaaatgattttgtaatttgtgctgaattctgatgcatgctatcttgtcagtatttcagatgaaagtgatagaaaagacacttgtttattgagggagcagttagcaagccactcagagtagatacacaatggcctgccctaagtgaactggtgggaaataagagttgcttgatcgttgattttttatgaaagtagagcctaggactttccgtaggtgtgagaaagtgtgtgatggaaagaggaggatcagggatggtgtggaggtttctgacctgagagaggggacttggggacttcagtccccacatccatcttgaggttattcactcagtgtcaggttgcatagaacacacaaccgtgaaaggtgacgtgacaggtgctctgcagcactttcacttttagatagttctggctgaacttgtgatctcactaaagatagaaatagattttcaagaaatccatggtacagaggaaaataattttgtaatttattgctggattctgatgcatactatctcattagtatttcagacagaagtgataggaaggacacttactgaggaagcagttagcaagacactcagagtagacacacaatggcctgccctaggtgaactggcaggaaatcagagtcactctatccgtggttggcttacgaaagtagaaccataggactttccacaggtgtgagaaagcgtgtgagggaaagaggaggataatggacggcatggaggtttctggactgagagaggggatttggggcatgaataactgagagagtagcagggtgggaggggctgtgtcggagctgagcagggctgagtgggagtcatggtctatactgaaagcagagtagggatctcatggggactctcttccttctacctggaccccaaaactcacaggtccctccactcaaccaggaaaaagaagagggaagctcatatgctcttcgccctcagttcaggaatggggggtgaaccatttcatttctggaaatgctgagacccagatttagcaaagaccaatttcctcatttaaagggtgcacccacatgaccatgccctcctcctatcctccttcctgacttaatgggagaagtcgtgtcacagaggaggggctgaagcctcaaataatggacagggcagtcagtacttttcagagcgtaagtcttggtcagagataaatagaaggcaaaccctttgatcaggatacacaatgacatggcttcatgacaggcatgccaaatacatttctgtttgtgataaatcatggagtctgttatagcagcacaacgtagactgaggtggaagtgaagtccaggaagctgggctgcacagctcctcatcctcattccatcatttccatctgtgcattttcctggtgattccctgcccctggcacattcctcactgtcatttctgctgcatcacagtcacaggcctgcaaacagaaactgagtctcttcctgtcaccccctgctcacactgctgggaaatcttgctaggaagggcttggaaacaggaataaggctgggtgtggtggctcacacctgtaatcccagcactttggtaggccaaggcaggtggatcacgaggtcaagagatcgagacaatcctagccaacatggtgaaaccccgtctctactaaaaatacaaaaattagctgggcctgctggcatgtgcctgtagtgccagctactcgggatgctgaggcaggagatgaacctgggaggagcggaggctacagtgagccgagatcgggccactgcactccagcctggtgacagagagagactccatctcaaaaacaaacaaacaaacaaagaaaaaaaaaacaggaataaagccagaggtcaggaccaacagggaccatgtaagtgctgcaactcagacattcacatagaagaccggacactattccgaagagctgtccagtgggagaaaacaatgtcaccgctatgtgtaagttgaaaggcacggccttcaataacctcaagtcacataaaccgagaaagaagcatagacgattttatgagatgaaaacatgatcacattggatgaaatattctgtaagtatctattaaatccatttcttctatagtagggattaacgttctttgtttgtattgtctggaagacctgtccaatgctgaaaatgaaacatagaaatctccagctattattgtattggggcctatctctctctttagttctaataatatttcctttatatacctgggtgctccactctttggtgcacatatatttaaaactgttatatcttcttgctgagttgatgtcttattcattatatattgactttattgtctctgcttagagtttttgtctcaaaatatattttgtccaatataaatatagctacacctgttttgtttcatttctattagcatggaacatctttttctatttctttatcttcggtatatgtgtgcctttataggtgaagtgtgtttcatgtaggcaacagatcaattgtttttgttttttcatccattcagccactctatgtgttttgattggagagtctagtccattttcattcaatgttttcattgataattaagtaaagacttagtcctgccattttggtgtttgatttctagctgtattttggtcttctcttcctttgtttcttactatctttccttactgaagataattttgtctggcgatacaatttagtttcttgctttttatggtttgtgtttttttttgtgaatccattgtatgttttctggttcaaggtgaccatgaggcttgcaaatactattttataacccattattttaacatgatagctacttaacaccctttacttaaaaaaaacaagcaacaagaaaacttatagaaactctatactttaacttcatccccccgccttttaacttttagttatttctgcctatatcttattttactgtgtatatcttcaaaagttgcagttattattattattattggttcattgtttagtctttctatttaggaaatgagtagtttacacatcacggttacagtgttataatattgtgtgtgtttccactaaaaaatctgctgccaggtgtattgcagctgcattgtatgctattttttttctttggggcttgcaggattttttctttgctcttgacctttgaaagtttgattattaagtagcttgaattagtcttctttgggttaaattgtcttggtgttctataacctgcttgtacttggatattgatctccttttccaggtttgggaagttctctgttattattcttttaaataaactttctaccactatttctttctctactttttctttaaggccagtaactcttaggtttgcctttttgaagctatttttctagatcctatagccatgtttcatggcttcattgttttttactccttcttcttttgtctcctctggctgtgtgtttcaaatagcctgtcttcaagctcactaatattttcttctgcttgatcaattctgctgttaaaagactgatgcattattcagtatgccaattgcatttttgtattttattttgctttatgttctgggatacatgtgcagaacatgcaggtttgtttcataggtaaacatgtgccattgtggtttgttgcacctatgaacctgtcacctatgtattaagctccacatgtattagctgtttgtcttgatgctctccctctctttgcccccaccaacaggccccagtgtgtattgtttccctctccgtgtctgtgtgttctaactgttcagctcccatttatgagtgagaacgtgcagtgtttggttttctgttcctatgttagtttgctgaggatgatggctttgagcttcatccatgtccctgcaaagggcacgatatcattcctttttatggctccatttctcagctccagaactattgtttgagtccttttaattattttaaacttttcggttaacttatctaataaaattctgaattccttctctgtgttatcttgaatttatttgagttttcttaacactgctaaattaaatttcctgtctgaaaggtctctgcttctccctggtgcttatttagtttatttggggagatcatgctttcctggatagtgttgacactagcagatgttcttcagtgtctgatcattgagtaattaggtatttagagtggtcttcactgtctaggcttatttgtacctgtcctttttttgaaggcataccagatattccaaacacttgaatgttttgatttaagctgtatctcctttggggtgaactaaaaaccagtaatgttgtgattcttgcagactcatacagttaccaccttgatgatcttggacaagttccaggataattctctggattacaatgcggagacttttgcccttttccctttctttctccccccaaaaaaacagtgtgtgtgtgtgtgtgtgtgtgtgtgtgtgtgtgtgtgttttgagacacctaaagctggggatagactaataaaagcaccgttgtggtcaccaccactatgactgggtcagacctgaatccagtatagcactggatctcactgaaggccttctgtatccactccctggttgcaacctaagttcactcaaggccctgggactctggaagcagcagatggcagagcaagccaggtctgtgtgcattccttcagggcggtgagttcccctaggccttgggtgggtccagaggtgccacctgaaagttggggactaaagtcaaaaaccttagaagtctgtatggtgcttttattttactgcagcagagctggcactcaaaccacaagatgcagttcttcccacactcctctttccaaaggcagtggtcaccccataaccattgccacaatgaagagtatggccagactaccacagatgtttccttaaggcccacagtctcttaagtcaactcatagtgaatgctgccaggcccaggactcattccacagggcaatgaactccgtctggcccaaagcaggtaaatagatgtcatccaagaaccaagtccctgaattaggggtcccaagagcctgcttggtgctctactcccttgtggccatgcaggtacctaaggtgcaagatgaagtcccttttgcttttttctctgcttttaccaagcagaaagagtttttcctcatagccaccacaactggtaatgtgctgtgtcccatctgaagccagcagatcttagaagctcatccaagaccctcagcatagtacctgggtattgctgataccattagcaggtgataactctcctctcctcaagtgaaaggaaggggtctcttttagagccacagactgtgcatcctggagttaagtgaggggtaaagccagcactccattagtcaccaaagctgctgtctcagtaagtcacctgaccccctcttcaccagtccattgtctctgggcccagttcaaccccatgactcacctaagaatttctggccttatggcctagactgccttttaagcttacttgaaaaaccagagtaccgtagctctcactggcaaggtttgcaggaactcaagtttcaaccgctgggatcagggattttcctctggctaagcctggcttaaatgctccctccattggtgtgtgtcagctgagtttgatccaatttgcctttcttctgtaacaggacagcaatgacttcaatacctcacaattgctgtgctctcctccctccagtaccccagtacccagagactctgtaccacattcctgctgcctggatgaaggactggcattggcaattcaagacgtttttttctatctcttcagtgatatagagttaaaaccaggtatctatgaggattcacctgcttttggtttttatgaaggtgtttttcttgtgtagatacttgttaaatttatgtccttgaggcgtgggggtaagattggtggagcactctattgtgccatgttgcaaggtctccccaatttaaattttgatgaaatccagtttatctgttttttcttttgtttcttgtgcttttggaatcatatccaagaaatcgttttaagatcctatgtcatgaaatattcttcgatgttttttctaaaaatattaaaattctaggtcttacatttattgtttgatacattttgagttaattcttgtatgtggcttatggtaaggtcccaactacatcctcatgcatgtgtatatccagtttccccaaaatcactggttgaaatgagggtcctttcccaaaagggtgtcctggcacatttattgaatctcaactgaccacctatgtgcatgtttactttttggctatcctttatatttgattgatttctaagtctgtccttaagccagcaccacattgttttgattactgtagttttaaagtggttatatttgggacacaataaaacaggcactggcaaagtcacttttaggctttacacatcttggatttgtctttgttattttttcaggagtcatataaatactattcctcatcattatgcctatatcttgagaagtaaagacacatgccctaatcagctgtgctggggaataggtcaccatgagatagaagacacttctcagtgtccaggaaacacttcttggtctctttcttcccatggcatgactcccatctcaactcacaccccccatactacactttttgttgtcaccaacacagagtcattgagtgaagcttagattctgttttcagttccctctagttcactagcctcaaaacattcaatgctgagcagaaggtgagtgcctgttgtaggctggaccaccttgcaaaaatgctgcttataaaaataatttctgtcttcctggcccgagtcagtccttcacttccatctatgtgcagcctgttttgctgctggaaccgactgactaatttataacaaatagtaatttatttggcacaattctggaggctggaatatccaggaacatactgttggcatctgtccagggcctttgttttgcatcatctcatagtagaaggaggaatgacaaggagtgagatcaagagagcaagatagggccaaacttgcttttataataaacttactctcacaataactaacccaattcagtaaaaatgacattgatctaataatgcagagcccttatgacataatcacctcttattacaccccacctcaaaacacgtggattggatattacatttttaacacatgaactttgcggcacagattcagactatagcagccacaaagggagatgaaggaaatatcacaaaaatccagaagaaacgatgtcttctcacttcctccagctataactgggcacatttgctcacacaatcatttctgtattctcttcacacacacatatgttgaacatcctctctgtgcctggtcccatgaagttgacaccccccaactccctcatcaatgtttctctccacactgaatagaaattcacattgaattttcatgagtgatagacacttagtattcactctttattccatttaacagttagcttatgttgtcaaaagatgattaacgcactttcctcttttttgagcttcccaagactcaaagatgtcttcagaacaaagtgtaaatcttttacattggcatccaggtttttctaatagaaacctagcctctaggatacttccaagaacttcttaactcattctgtgctccctaaaaataacctattaatgtggcagcaaaagcatgttgtggcatatctcttttgtttttgatactgtttgccacttttgtttaattcttacctcctctccatatagatagaacatacaagtattttaatattcagaataatttccacctcttattgaattacacccaaggttatgttgtgtctatttagggggaaataataagattttaataattattttgtgacccatatatggactactaacaaaaattgagtttttctcctatcttaaactctgtagcattaaaactcatgctagcaaaatgaataataaattttggtctgaaaatccaaagtgaattctggctgcatctgttatagagatttggagctataattcatcaaaaacgaaacaacacctctttcttactctgtcttcttggcccctcacttgcaaatagatgcaccgatgttcagcaccatgaacagtgccaccgaggtttatttttaaaaaccactttaggggacttgggcatcaaggttaaaagtgtcacagagtagatttatttttggggggtcttcagcaataactggaaagatttaaagaccttttagaaaggaaggctttagagttcagaaatgactttttgttttttgagcaaagccctatttgctgggagaacatcaggaattttgattgaggaggggagagaaagttttggagtgggtcaccagagccaattcaaataccgtttgttgaacactggttcctgaactctatgttgtctctttgtatctgaggcatgattcctgcccactatgagcacagagtagtatctgagataaagatgagcgtaaccaatggacaaagcactcaactgagctgatgaatatcattcaagaaagggcagtcaccgtgtgcttgtatagaaaagccaacacgtaggactgtgtaggttattcaaatgcaatagccaccagccaaggggcaagtcgatatgaaatcaaaggcattttctgctcagcaagccatgggtcccaggataattttaatctactcagagcaagaattgcttaattccagaagaaattaattccatgctagtgaaggggcctatgatccattatcaaaatataaaagttacctagactgagaaagggaaggtgtacaaagaagagtgtacctattgaaaacccaagagattccagtgagagaggagggaattttattccatacaggaatggaatgagggagaaaggtgtgcagagcatgattagctgtgcattggcacctcaaggtatctggatgttaggttaaagatgagtaaggagagaatcatacccatgagtagggttgaagttgaaagagctattgcaatgaacatggggagagaggatgtggaggatcaaaatgatgcctgagatgagcccggtggaagagaggccatttggtggaaccctcaccaatttgaattcactagtttttaggcaatacgttgtttctcctaagtggttctccagatgttcagtgaagcagataatcatagctcttgtagagggaataggactgtgattctgccatcttggtgggaattctgagaagttgagaatggagggtggagccaattgctgcagacaaacattcccagaagaaaagaatttaggcatctggctggtttcagcaatgacataaaccagtgactactgtctattttctgttgacactataaaataaatatgttcattgcatttttcctatgttcgtttcagtattgtgtgtttgatttgtatagggcagataatttattcctttagtgaacatgttgtgagaaagtgcacctgataatttgtactcacctcaggaacaccaggtcctgagttagataataaaacaataaacttcactctgagtctgttcctctattgcattggtttctgggattatttagaaggtaagtgttttggggatgtgggaagtgtatgagccagtgggggctaagtggaactcattttcaaaaatgtcccatgataatgacaagtcaaaataaccacagcttgtgtagttccctccccttagtttgggctttctgtgtgacagtttgatcaatataatgccatagaagtcacactgtctgcctttcaaagctaaggcctatgatgcctcgcaccttcttcatgagacttttggaaggcttttttttggtggaagccaatcattgatcatgagttgaggaaattcaaggcactaatgtggagatgagttaggaaaggaaataaacaaccagcccccaggtgttcagccacactagtgttgagttggacatgagtgaagcatcttctgaaatctctgactgtagatctttctgaaatcgagacacccaccacataatctgtcacctacctgagtccactaaacctacaaagctgggagaaatcagaataaatgatctaagccaacaggtgttgggaggttgcctgtgccgcaataccaacagtaacagcagcaaagcagaatctgtttactgtgttcatgtgcatgaattgtgtccattccaccaataaaccacttattttgtgatataaaacaatgaccatttgtttacaaagagaaatctcaggattctgcccacataaaatggaaaaatctgaaaattctttcgggaaaaaaaggattctttaaagggaatcattgaacggtgattctatcgcttggattgaaaacttcagatgtaaacatttcaactttttctttcagtgtcttcagtgcatctcacacaaatctaggcagtttcaagacacaagaaacactcttaggatgagtgaagaattaagatatttcacctagctttcctcaaattacaaagtctctccccaaagccaattatgcctgtatgtttgtaaacaggtacctaacatttcactgcaatcagtcatctaaaatgaaagaattttggttcagagtgtgtgacgtaaagtacgggctgtagaggatgttgtttgttttgtcatctcagacattccagtggtcttgtgactcactgcctgtttcacttgtgtccttgtgccactttgtctttttccccattaaagtaagaaccagatcctggataatttagtgaagttttaatgaccaagtgtagaggaaggtgtgaggagagatcgttctgttagcaggctctgggataccacagtcatggagaaatggggagtttctgttgctccttaacagcagggagtgtggacatcaccctaaatcacagacacacagtgaggtcaggaagacatcccaccacacttgcaccatcttcacgtaacatagtgggagttgataggcaaagctgtaacactgtttgccatttaccattacctgcaagaggaaaaatgcatcagaaatacagcatgccacaaaacaagctatcagccatagtgcctatagtaaccaaccagaaaactcccaattatacatcagaaaccagtagacatacttctatctacagactacctttgtgcctatttcagacattcattcattttatttccaatgtttcctctcattagtccggaagttccgccactctgtgtcacacagttcctgtttcctcagcctcttctctagcctggaatatgccatactctgtgtcatgaacttgaatccttgcatcttctacaggggttcacacagggttagtgatcaacaatgttcattgaatgtatagttttcagttatacagactgtgactgccattcaccactgatggcctactttctctttggagttgcccagggctgccaagcaggtagcaaggaatgaaatccaagtgtttttagagaaaaagaacagaataggtattgcaaaacataatatattattttgaacaactgataggcatatgaaatctgaacaaaatgttaacctttggctttacccatttgaaaagatcaggaaggttggaaatattatttattactaaagctataaaacagtcaattttcagatgttaatttataatatttaaaatgcatacaattttgagccagttatttcatttctttgtaattattctttaatacaactactgggaatttgatttaaaaaagttgattagaaagcttaatacagcatcatttgtgagagcaaaatactggaaacagcctaaatgtccatcaaaagagtcaaattcaataatttttgataaccattctacaggaatattatgcagtgtttaaaaactgaggcagcaccatgaatagatgactttgcaaaatacagtgtttgacaaccagtccagtccaattcctaaagtacatttgttcagaaagaaaagaaaacatagatctgtatatttctgtaaacagattatctccataatttgagtagagaagccagtaatattattgtactggggaataaaattggggctcaatactgagggaaagactaaattttgggctcactgaaactattttatttacatgcagattttctccattttggataaatgaaaatatataagtaacatcatcactagaaatgagcactatgggaaaaaacagaggagattcttcacgttgggggaaatgacaggtgagatgaccttgatcctggtcaaatttgggaaaatagctgaagatggcagtgcaagcagagggtgctctgtgatgaaaagtctggagcaggagcagttatgggagatgggccccaagggactcttggggccagcttacagagagctgcctcctgctctgggagccgagagaggtcaaacactgaaagcccctgggatactcacctggtactcattgtccagctctgagatgtgcaggtcaaattgtttgccatccttaaagggcataccttcagattttccttaatgcttccaggctccacacacatgctgttcatgaccacccaattgccaaagtacactccaaagtggaaggcaatgtctgacttcttatctatcccggtgtggaaatcaacctgcagctgtgggtccttgctgaggtcaaagcacacagcatgttggacaggtcccttctgtatagggcacacacaggacacacacacaaatctcttcccacctttcccaggacagacagaagccttcccggtgacactgcaggcctcatccctgcaggactgcttcagcttcttgttccctcatgcagggatatgctctgcccctcatccccagatggaaactgagccacagtcactgacctgaggctatgagttgtctattctctgagaactctatactccttgatagaagtgtcagtggcagatagagatcctcttggaaactttggcaggtccctataggtgagtcatagcacagatccggaaaatgtggagcaaagacatgccatcctttgtggataacctctctccatttgagaaaaagcatttgccttgctactgggccttaatagagagtgaatacttaaccatggcctccaattttctgtgaatcctggcttctgtcaagaatcaggtatgacccaccatatttgttccagcaaaagacacgatctcattatttttatagctgcatagtattccatggtgtatatgtaccacatttttctttctccagtctaccgctgatggtcatttatattgataccatgtctttgctattgtgaatcatacatgtgcaacaaacatacacgtgcatgtgtctttatggtggaacaatttatattcctttgggtgtatatacctagtaacgggattgctaggtcaattggtagttctgtttttaggtctttgaggaattgtcacactgtgttccacaatgattgaactaatttacactcccaccatagtgaatacgcattcctttttctctgcaacattgccagcatctattactttttgatattttaataatagccattctgactgatatgtgatggtatctcactgctgttttgatttgcattccctaataatcagaaatgttgagcttttccacatacgcttgttggccacatgtgtatcttcttttgggaagtgtctgttcatatctcttgcccactttttaatgaaattgtttgtttttttcttgtatattccttaagttccttatagatgctgaatgttagccttttgtctgatgtgtagtttgcaaaaatgttctcccattctgtaggttgcctgtttaccctgttgatagttttcctttgctgtgcagaagctctttagtttaattagatcccattcgtcagtttttgcttttggtgcaatagcttgcaccatctgcatcatgagttctttccccattcctatatccagaatggcattgcctaggttgtcttctagggttttatagttttgggtaatacgtttcagtttcagtctctgatccatcttaagttgatttttgtgaatggtgtaaggaaggggtccagtttcaatcttctgcatatgctagacagttattgcagaaccattcattgaatagggagtcgtttccccattacctgtttttgtcagctttgtggaagatcagatggttccaggtttgtggccttctttgtggtctctctgttccatatgtgtttgtttttctacaaatactatgctgttttggttaccgtagcctcatagtatagtttgaagttgaatagcacgatgtctccagtttttttctttttgcttagggattgccttgatcatttgggctttttgtttgttccagatgaatttttaaatagttttacctagctgtttgaataatgtcattggtaattttacaggaatcactttggatctacaaattgctttgggaattatggtcctttaaatgatatttgttcttcctaaccatgagcatggagtgtttttttgtttgtttcatctcagatttctttgagcagtgttttctttttctgaatttttgccttgaagaatctggcaaattgtattttacaaaggtggtcatgatgatatctcttatcctatacgcttttctccagtgtgattttttatatatattttttatttccatgggtttttggggaacaggtggtatgtggttccctgagtaactctcttaatggagatttgtgagatttggggtcacccatcacccgaggagtacacactgaacccaatttgtagccttttatctcttatccccttccctcccttttccccccaagtccccagagcctattgtatcatttttatgcctttgcatcctcatcgcttagctcccacttatgagtgagaacatatgatgtttcattttgaattaatgagttacttcacttagaataatggtctccaatcccatccgggttgctgttaacaccattaactcattcctttttatggctgagtagtatttcattatatgatggttatttgcactggtttcacatatttgcaattgtgaattatgctactataaacatgtgggtgcaagtatcatttttgttaatgacttcttttcctccaagtagacaccaagtagtgagattgctggatcaaatggtagttctacttttagctctttaaggcatcccacactgttttctatagtggttgtactagtttacattcccaccagcagagtaaaagtgttccctttcacctcatcccgtctaatgtctattattttttgatttttgattacggccattcttgcaggagtaaagcagtagcacattgtgcttttgatttacatttctctgatcattagtgatgttgagcattttttcatatgtttgttgcttatttgtatatcttcttttgagaattgttttttcatgtccttagccccctttttgatgggattgtttgtttttttacttgctagtttgtctaaattagttgtagattcttgatattcgtcctctgttagatgtacagattgtgaatattttctcccactctgtgggttgtctgtttactctgctgactgtttcttttaccatacaaaaactccttagtttaattaagtacaacctagttatctgtgtttttattgcattggtttttgggttcttggtcataaaatctttccttaagccaatgtctagaagggtttttctgatgttatcttccagaatttttatagtttcaggtcttagatttaagttcttaatccatcttcagttgatttttgtataaggtgagagatgaggatccagtttcattctcttacgtgtggcttgccaattatcccagcaccatttgttaaatatccacttatgcttattctccactttatgctttcatttcctttgtcaaagatcagttggttgcaaatacttgggtttatttttgggttttctattctgttccattggtctatatgcctatttttataccagtaccatgctgttttgatgactatggccttatagtatagtttataatcaggtaatgtgatgcctccagatttattctttttgcttagtcttgctttggctatgcagattcttttttggttccaaataaattttagaattcttttttctagttctgtgaataatgatggtgggtattttgatgggaattgcattgaatttatagattgcttttggcagtatggtcattttcacaatattgattctactcatccatgaacatgaaatgtttttcctttttttgtgtcatctctgatttctttgagcactgttttgtaattatcatcgtacagatatttcacctccctagatggctgtatttctaggtattctattctttttgtggcaatcatgaatgtgattgtgttacttatttggctctcatcttagctgttgtaagaaagaatgatagagatttttgtatgttgattttgtatcctggatttctctaaagttgtttatcagcttaagggccttttcagctgagactatggggttttctagatacagaatcatgttgtctgcaaacaagaatcatttgacttcttttcttcctctttggatgcccttttttcttactcttgtctattgctctggccaggaccttcgctaatatgttaaataaaagtggtgagagagagcatctttgtcttgtgccagtttagaggggaatgctttgagcttttgcccattcactctgatgctagctgtaggtttgtcatagatgactcttattattttgaggtatgttccttcaatactcagttgattgaggtttttaacatgaaaaggtgtcgaattctactgaaagccttttttgcatctattgagataatcatgtgatttctgtcttttgctgtgtttatgtgatgaatcaaatttattgattggcatatgttgaaccaaccttgcatgccaggggtatagcctacttgatcatggtgggtaagcttttttcatgtgctgctggattcagtttgccagtattttgttgaggatatttttattgatcttcatcaaggatatttgcctgaaatttgttgttgttgttgtgtctctgccaggttttgatatcaagataatgctggcctcacaaaatgagttaggcaggtatctctcctcctcaatttgttggaatacttccagtaggaatgataccagctcttccttgtatacctggtagaattcagctgtgaatccatctggccctgggccttttttgggtggtaggcttcttattactgattcagttttggagctcattgttggtctcttcagggattcaatttcttcctggttcagtattggtcaggtgtatgtatctgggaatgtatccattttctgtagattttttagtttgtgtgcatagaactgtttataatctacctgatggttgtttatatttttgtagtgtctgtggtaatatcccctttgtcgtttccaattgtgtttatttgaatcttctctcttttcttgtttattagtctggcatgcagtttattttgtcacttttttcaaaaaaatgaactcctggaatcattgaatttttgactggttttttgtgtcttgatctcctttggtttagttctgattttttatatttcttgtcttctaaatttgaggttgacatgctcttggttctctacttcttttttaatttcaaaattaattttttcaaaatcgtcacatggtaggcattctctagttcttttaggtgtgatgttatgttgctaagttgagatccgtgtaactttttcatgtcagcatctagtgctataaataatccttttaatactgccttagctgtgtcccagagattttgtatgttgtattatttttctcactagtttcattgttctcatcagtttcaaaaaacttctcagtttctgacttaatttcattatttacccaaaagtcatctagtagcagggctattccatttccatgtcattgtatggttttgagtgatttccttagtcttgatttctaattttattgagctgtaatctgaaagaaggattgctatcatttctattcttttctatttgttgaggagtattttatgtctgattatgtggtgagttttagagtatattccatgtggttttgagaaaaatatatattctgttgttttttgggtgaaaagtcctggagaagtctatcgggtccatggatcaagtgctgagtctaagttctgaatgtcttcgttaattctctacctcaatggtctttctaatactgtaagtggggtgttggagtccctcactattactgtgaattctattattcaaagtctcttggaaggtctctaagaacttgctttatgaatctgggtgcttttgtgctgagtgcatatatatttaggatagtcagatgttcatttgaataaaactctttaccatttggaaagcccttagacaacctttcaaagtgacttggagccccagagcactgtaggatttgctggaattcaagttccagccaatgggataaaagattccccttggctaaggctggtttaagtgctccctcagttggcatgcaagactggagttgcaacactttttcttatcacttcaatgcctctttcagcaatacagagttaaaaacaggtactacgagggcctacctgattcttggttctcatggaggtgctttttctatacggatgttacaagatagagtgtcctaaatgtgagttgtccaagttcttggcatattggaaaaataaattgaacaaaatgccacagagtgggcacagatttattgaagacaatttacacagtggaagcagactccacttgagcaagcagctgcttaagagccccatcaagggccagacaaggtggctcacacctgtaatctcagcactttgggaaaccgagaagagcagatcatgtgagtccagaagtttgagaccagcctaggaaacgtggtgaaacccagtctactaaaaatacaaaaattagccagccatagtagcacatgcctgtaatccccgctactcaggagactgaggcatgagaattgcttgaacccagcaggcaggggttgcaatgagtcaagattgcaccactacactcctgcctgggtgaaagagtgggactctgactcaaaacacacacacacacacacacacacacacacacacacacacacacacacagagccttctttgtttttttttccagtatctgaaaacagctttatggtatatttatctctgtgtatttatttatttatttttaattattattatcctttaaattctggaatacacgtgcagaacgtgcaggtttgttacacaggtacacatgtgccatggtggtttgctgcactcgtcaacccatcatctacatcagatatttctccgaaagctatctctccccttgttcttcaacccccaaaaggccccagtttgtgatgttcccctccctatgtgcatgtgttcccattgttcaactcccacttatgagagagaacatgcggtgttaggttttctgttcctgtgttagtttgctgagaatgattgtttccagcttcatccatgtccctgcagaggacattaactcatccttttctatggctgcatagtattctttggtgtatatgtgccacattttctttatccagtctatcatttgggttggctccaagtctttgatattgtgaacagtgctgcaataaacatacgtgtgtatgtttctttatagtagaatgatttataattctttgggtacatacagtaatgagattgctgggtcaaatgttatttctggttctagatccttgaggaactgccacactgtctcccacaatgattgaacaaacttacactcccaccaagagtgtaaaagcattccaatctccacatcctatccagcatctattgtttcctgactttttagtgaccaccattccaactggagtgagatggtatctcatcgtgattttgatttgcatttctctaatgaccagtgatgatgagcttttcttcatatgtttgttgggcacataaatatcttcttttgagaggtgtctgtttatatccttcacccactttttaatgggattgtttgggtttttttgtgtaaatttgtttaagtttcttgtagattcttgatattagccctttgtcagatggatacattgcaaaaatttgcccccattgtataggttgcctgttcactctgatgattgtttcttttgctgtgcagaagctctttagttttattagatcccatttgtaattttgggttttgttgccattgcttttggtgttttagtcatgaagtctttgccgatgcctgtgtcctgagggtattacctaggttttcttccagggtttttttttttgggatttaggtcttacatttaagtctttaatccatcttgagttaatttccatataaggagtaagaaaggggtctagtttcatttttctgcatatggctagccagttttcccatcgccatttattaaatgtgcgcatggcacatgtatacatatgtaactaacctgcacaatgtgcacatgtaccctaaaacttaaagtataataataataaaaataataatcataaaaaatatgtaatcctttccccattgcttgtttttgtcagatttctcaaaaatctgatggttgtagatgtgtggtgttatttctgaggtctctcttttgttccattggtctatacatctgttttggtaccagtaccatgacatttggtttctgtagccttatagtatagtttgaagtcaggtagcatgatgactccagctttcttgtttttgcttaggattgtcttggctatagtgaagaaagtcaattgtagcttgatggggatagcattgaatctataaattagtttgggcagtatggccattttcatgatacttgttattcctatccatgaacatggaaagtttttccatttgtttttatcctctcttatttccttgagaagtggtttgtagttctccttgaagagatctttcatatcccttgtaagttctattcctaagtactttattcactttgtagcaattctgaatgggagttcagtcatgatttggctctctgtctatcattggagtatagaaatgcttgtgatttttgcacattgattttgtatcctgagactttgctagagatgcttatcagcttaagcagattttgggctgagacaatggggttttctaaatataccatcatgacatctgcaaacagggaaaatttgacttcctcttttcctatttgaatatactttatttctttctcttgcctgattgccctgtccagaatttccaatactatgttgaataggaggggtgagagagggcatccttgtcttgtgccagtttccaagggaacacttccagcttttgcccattcagtgtgatattgcctgtgggtttgtcataaatagctcttattattttgaggtacgttccatcgatacctagtttattgagaatttttagcatgaaggggtgttgaattttatcagaggccttttctgcatctattgagataatcacgtagtttttgtcattggttctgtttatgtgatggattacatttattgatttgtgtgtgttgaagcagccatgcatcccagggatgaagccgactgatcgtggtggataagctttttgatgtgtttctggattcagtttgccagtattttattgaggattttcatatcgatgttcataagggatattggcctgaaatttcctttttttgttgtgtctctggccaggttttggtatcaggatgatgctggcctcataaaatgagttagggaggagtccctctttttctatcgtttggaatagtttcagaacaatggtaccagctcctctttgtacctctggtacaactcagctgtgaatctgcctggtcctgggctttttttggttggtaggctattaattattgcctcaatttctgtgcttgttatttgtctattcacggattcgacttcttcctggtttagtcttgggagagtgtatgtgtttatgaatgtatccatttcttccagattttctagtatacttgtgtagaggtgtttatagtattctctgatagtaatttgtattactgtgggatgagtggtgatatcctctttatcattttttattgtgtctatttgattcttctctctcttcttctttattactctggctagcagtctattttgttaatcttttcaaaaaaccagcttctggattcattgattttttgaagggttttttatgtctctatctttttgagttttgctctgatcttagttatttcttgccttgttctagcatgtgaatttgctcttgcttttttagttattttaattgtgatgttagggtgtcaattttagatattttccacctttttgtgggcagttagtgctataaatttgcctctaaacactgctttagctgtgtctcagagattctggtacattgtgtctttgttctctttgatttcaaagaacttacttatctctgccttagtttcatcatttacccagtagtcatatacctttacattttaaaatacccagacaactgtcattggattgtgtgcaacagaaaagataaatgcttgagtagacggatgtcctactctctgtgatgtgattatttgcatccctatatgatattttatgtaccagattaatgtatacacctactatggacccacaaaaattaaaaacaaatgacagacaaaagactaatatacacatgaaaacatatgccacgtcacgggtcattagggaaatggaagtcaaaaccaccatgagataccacttcacactcattaggatggctattacattaaaaaaatgaaaactaacaagtgtgaggatgtgaataaactggaacccttgaacattgctgtttggaatgtaggatggtgtggctgctgtggaatatattatgcagttcctcaaaaacgttactcatcataatatacatctctttggcaactgggatcaattttttctataaattcaataatgtcaattcactgacaataaaactgaagagaaaagtgaagtaagagggagaagaaagcaaaggaggaagggaattctaattcactccatctttaaattctaatacaggtattaaggatgcttcccttcatcacgaaaagagaacttgaggaggggtcctgagtctcccaccccaggtgaagaagacttcattatgactgaagtccaatcacctgtacctgcacatgtcctcacacagtctggaactaaggagcacacaaatcaagaactagacttaagaatctcaactttctccctgaatctgcaggagaaagagtgtctctgaaaatttttattcctatggacactcaatgaaaagaaaagggtgcagctagagcccaggtgtgtgagatgcagatgggaacagccctcacctggcagagccaaggggaccagtgtgggatcggggaacacaagggctttctctaccttcctccataggtcctgcttaggatcaagaccagtgttcccccagaacctctatagggaaagggaaaggttatctttcactaccaatgatttctacaagaatcttcactatttttaccattgtacaaattaagaaaatgtacaccttcttgggaaattatgcacagtgaagagaaggcttaatgagaggcatggatgctggacttcacaatccctcatcttcactccatcatccttatctgtgcatttccctggtgaccccttcctcccccggtacctctatcactgtcatttctgctgcatcacagacacaggcttgcaaacaagtgtgattgtgactgagtctgtttctgacaccttaccccttctcaccctgtgggaatccttgctgagagtgtcttggaatcaggaatgaagccgcatggcagggctgacagggaccatttaaatgctgcaagtccaagacattcacactgaagcctagacacaattcagaagagccaacctaagggagcaaatatgtcacccctacctgtgagttgaaaaggcacacccttcaataacctcaagtcacataaaggaaggtggaatagagactttatgagatgaaaatgtgagagtttgtattgtgagtgctttactagagttgtgtgtgtgcggaagacagagaccctggggctatggtgtctgagatgtttgtggggtgttgagtgtggaccctggaccagtgtaaccttttgtgagggtgcaatggcatctgatgagagtgaactctgctgagatgatgtgactttaggtgggaggtggagaggccaccagcatgggtgaaacgtgcctgagtgtaagagggtgactgtgttttgtcttcctgtctgtgatgtgtgtatgagcacagccagaccaatgcatgagcacctttacatgcacagtgagtaggcatgtgtgactcagtgagtggcgtggctctgtgtgactgtgggtgtgtgtgctgggatatgacttggtgttgaactgggaacatacatgtggctttctgtccatgtgaaggttcctcctcacacagcagggcctctgatgaagcagctgtgcatcttcccatgtgtgtcaatgtggatgccgggtggcagaactggtggggatcttggggactgggagttaccaatgactcgtttgtgagcattaatgagagcagaatgtatgatctgtagaggtctcttcccaggcagagtggaaaagaggaatccagactatgggaacgatggttccttaggtggggtctgcacacagtgaccatcatctcctccctgtcatcctcaggtctcttcctgtcccccacccaagcctgcccttcccattctagttcaggagggtatgcaaatcctgactctctgaggaataacattagagactgtggtttcagagactgaatcaccccaaaccgggaaggaacaagtgtagcctcagttcagatagagcttactgtggatattaatcatcaaagtagcagggtttgctggctcatgcctataatcccatcactttggtaggcaaagataggaaaataacttgaggccaggagtttgagagcagcctgggcaaaatagtgagacattgcctttacaaaaactttaagtaacagacaagcatagtggcgagcatctttcattacggctactcagaggccaaggtgtgagaatcccagcagcacagaagttcgagactttagtgagctatggatgcaccactgcacatcagcgtgggtgacagaggaagatcatgtctcaaaaagaaagacaaaatatccacttgtgggttctctctatctacttccttaacccacactcttcatttgtctaagtgctggggctgtgctttcaacaacttttacaacttctgggaacgaagtccgtggcccttgatgactgtgatgcatgttcatcccacacacaggggtttcctgttcttttgttatttccctctctcgttcaacaagtgttgcttcttactggaatggatttctctactgttacatcctcaggtcttgttttcacagatattaatttctctaagatcaccctacaaagtaagaatttctaataaagacaaaaaagtaaaaagtgtagaaagtagaggaaagaaagagtttaaataatcttccttgtacatgggaaattaaattaggcagcgatcaagtaatggatctatgattgcactgccagtaagaggcacaatcaggactggagtccaggaagcctggcttctgaatccttgctcctcatgtctttaggaatatggagttctgactgcgatagggtgaaagaggtaagtcctcacagtttgcctgttgatctctaaccttctgcatcatgggaatgtgtcacaaagctggaggccgcacctggcctggcccctctcacccactctcaatctcctagcaagtgccacacacaaggcctgtgtccttgtccattggttcttgcatgacaatcagagggacatcgatcatccctttcaagtgagtactccatggtccatggcacaggggtggaaaagaaaggagaatatttactcaggacgtggtctcatgtgggtaatgtggaaatgtgtagttggcaggatggaggtagcatgccactgtagatcctggggaccctccagcaccaggcatgaaacctgcagtggctaaactctgggctagtcatggggcctaggggaagaggacactcaaaggttggggctgtggctctttatcaaggggcatggaattttcagagaatgaacataggcccaggtaagtgactgtggctcactttccatcttttgatgaggggcagagcacgtccccacgtgggggaaatatgaggagctaaaacagccccacagggacgaggcctgtagtatgacaagggagccttcgttctgtactggggaaagaaaggaagggatttgtgtgtgtgtgttgattgtgtgccccacaagggaggggcctgcccaacacttcgtatgctttgccctcagcaatcattcagcgctgcagatggaattctacactgggacaaatgaggtctcagacattcccttccatttctgagtgcactttggccattgtttggtcattgacagccgtgtgtggcctggacgtatgagaggagctgcaacaatgggttctttgagaatggcaaaccatttgatctgagcatcttggtgctggacaatgaatacaaggtgaatgcccaaggagctcccaatacctggccttcttgggctctgagagcagaaggcagctctccctggcctggccccagtagttgttcaggacccatctctcataactactcctgccccgggcacagcaccctctgcttgcactgcctttctcagctcttttccaaaatctgactaggatcaaggtcatcacacctaggatttcccccaaagtgtagaatctcctcagtcttttcccattgtgctcacttctacttatgcagttatttaaattttcacttagctgaatgaatacaatatccataagaataaaattgttttagtcaacgaaaaattaagtccttctttcactcctggacccaatcttattcctgggagcattaccagtgctctgctctccttccacagcaaatctttgcttatggaaacatatagatctataatttcacttgtttttaagaaaatcccagtatacattgctctacacattacaccttaaaaactgatttgatttgttgtcaaagaatataccttgaggatcccgtctactaatggtgcttcctcagtttttaaagattgcataatattgcattagaaggattacccaaaattactgaacttgactgttttgatgggacttgaggttatttccaatattttgctctcacaaatggtgctgtattaagacttctagtaatttattttgtcattatccacctcccttacttatactgaaagataattacaaagaaaaaaataactggttcaaaaatgtgtgtattttaaatttaacaaattgacacctagaaggttactttatagcctcagtaataaagaatatgtcccaatgttctggccctttctaatggataggccaaaagattcacattttattcagattcaagtgagggatctctttctatgcttagaagctgttcaaaatgatagtctatgttttgcaacacttgtccaattgggcctctccaacaacacttgagttttattcttggccaccatcagcccgaatctaggcaactccaaagggaaagtaggccatcagcagtgaatggcagtcatagttcacggaaatgaaagatatacattcaatgaacatggtctagcgttaaccctgtgtgaacccctctgcaagatgcaggattcaagttcatgaaacagtcactagccatggggattttccaagctagaggggaggctgagcaagcacggaccatgtgacacagagtggtagagccttgctggaagaatgatatgaaacattagaaagaaagtaagcaactctctaaaataagcacaaatgttaacatgtaaatagaagtgtgtgtcttgggttcagttatatagctagtagttttctcaggggatgttgtaggtagtaggacagagtggagaggaggctgaaagcttgtttggtggcatactgtctttctgatgcattttccctcttttaggtaataataaatggccaacactgttacatctttgcccatctacttcaaccatattctgtgaagataatgcaagtgtggagagatgtctccctgacctcaatgtctgtctgcaattgagggagatgaccacatccctcactgttgaggaatgctgcttttttaaattatattttaagttttagggaacatgtgcacaacatgcaggtttgttatatgtgtacacatgtgccatgttggtgtgctgcacccattaactcatcatttaacattagatatatctcctaatgctatccctccccactccccccaccccacaacatgccctggtgtgtgatgttccccttcctgtgtccatgtgttctcattgttcaattcccacctatgagtgagaacatgcagtgtttggttttttgtccttgtgatagtttgctgagaatgatggtttccagcttcatccatgtccctacaaaggacatgaattcatcagtttttatggctgcatagtattccatgctgtatatgtgccacattttcttaatccagtctatcattgttggacatttggcttggttccaagtctttgctattgtgaatagtgcctcaataaacatacgtgtgcatgtgtctttatagcagcatgatttataatcctttgggtatatacccagtaatgggatggttgggtcaaatggtatttctagttctagatccctgaggaatcgccacactgacttccacaatggttgaactagtttacagtcccaccaacagtgtaaaagtgttcctatttctccacatcctctccaggagacctgttgtctcctggctttttaatgattgccattctaactggtataagatggtatctcattgtggttttgatttgcatttctctggtggccagtgatgatgataattttttcacgtgtcttttggctgcataaatatcttcttttgagaagcgtctgttcatatccttcgccatggaatccctctttctatgtgaccacagaatccccagagcctactgacagcatggtctctcctcaccctttcccctgcacttggtcattaaaacatcaccacacttcccaggatttggttcttgctttaatggggaaagaggaagtcatcatcctcaagaaggcccaaggaactttatgggaggcatccagaaaccaaagtggataaaccttcttgtgactccgggagtgacaaggtccttagaatgtcttagaagtcattatgtacggcatctttctacagcacattgttgacatcagagactctgagacaaataccttacccaatcttagatgactcactgcactgaaatgttaggtagctgtttaaagcctcacaggtgtacctcgaggctttggggagaaattttgtaacttgaggacaatctggtggaattttctaattatttccattgttctcaggatatttattgtgtaatcacggtgcctggctttgtacaggctaccatgcagaaactttagaaacagacacacttcccacatgaaaacttcaatccaagcaatagttagagaatcacaagagtcccaagatttcccttaaagaaccccaattgttgatgtttaaaaataatagcgagatttttctgatgtaagtggcagaatccttgaatttctatttaaaaataaatggttatggttttagatcagaaaatatgtagtttattgttgggatgaacacaattcatacatatggacacagtgagcagaccttgctttgttgctgtttcactaggcattgcagcacagcaaacctcccaacacatgttggcttagagcaatcttttcttctgatcttgctcagttaactggactcatgtgggtggtagatcatgtagtgaaagtgacgttttctgaaggatatttcaggctgtgattccagaggatgcttcactcatgtctgactcaacactagggctgggcgaacacctggggctggctggttatttcctttcctacctcacctccaaattcatgccttgaattccctcaaatcatgagagtctcctgtttcttggactgaatgatgataggcttccaccaaagcaagcctcccaaaaggctcaggaagaaggtgcaaggtatcataggacctagctttgaaaggcagacagtgtcacttctatgacattatattgatcaaagtgagccatacacacagcccaaatcaaaggaagggaacttcataagctgtggttattgtgacatgtggtcatgaaggagcatccttggcaattatttccactcggtcctcactggcttacaagcttctcatatatcaaggataccaatcctgtaaggaaccactgaaggcaacatgtttacaggaacaggctcagattgaagtctagtattttatcatccaatcaggatctggtgtccatgaggtgactacaaattatcaggtgcactttcaacatatgcactaaagaaatatattatctgccctataaaattaaacatacaagactaaaacagatataggaaaatgcagtgaacacacttattttagaggggcaaaagataataaacaacaaaactgaaagcaaggtgggtcaccaatagctctactggagccacccacaaaaattcagccagggttctcactcttattgcatctgctcaaaccagcatgacctattccgaaaatgttgtcttgatatgtgccgcttctgtttccataagtgcttaaaggatatagatttcattaggttagactaagtgatcttccttcaatttataagcaagacatccactcagtgaaagaaaccatgctagctctttgtacatgaaaaaaaaaattaaaacaaagaaaccaattcaaaaaaaaaaaaagacaaaaaaggcagccatcactggtccatatcattgctgaaaccaacaagacccccatttgcatcttctctgaaaatgtttctctgccacagttgtctccaccttctactgtcagtgtcttagagctcccacaaagatggcacaatgaaaacccttttcctgctacaagagctgttgtcacctatttcatgacacaaatagagaaccatttaggagaagataaacaacatattacctaaaagccaaacaatgcagattgaagagggtctcaacaaatagcctctttgtctgcagggcccatctaaggcatcattttgatcatcctcattctccgttctcatgttccttgccacagtttgttcaactccaaccttactcatgggtatgcctcccgttttgccctcctttaacctaacatccagatacctttaggtgtcaatgcacagtaaataacactctcatgcctctctttcttgtttctttcctgtatgaactgaaattcccttcattctcactggggagtctcaggttcttgttagacacattctcctccttatatcttccctctcacagttttgttcacttctctgttttgatgatggatcacaggccccctcatcagcatggaaatcattttttggggaattagacaattcttgctctcagtggataaagacaatcttggaacccatgactttctgatcagaacacgagtttgatttcatatctacatgcccctggttgatgcccattgtatttgaatagcttacagggtcctacatgctgtccctgccaggcaaacacacagtgactgccttttcttgactgatattcaccagctcagttcagttcatataagccttttgttacacttatctttataccagctgctgccctgtgctcttggtggccaagagagatgtctgagatgaaaagagaaggcatagagtccaggaatcaatgttcaacaaacgatttttgatttgcctctggggacctactcaacatatttttcatacagataaaccggaattcatggtcttctcccagcaaacacagcattgctcagaacacagcatttctggactctaaagccttgccttctgaaaggtctgtagggcttttcagtttttgatgaaagcccccaaagaataaatctactctgctaatgttgtccttgatgcccaagtcccctaaagctgtttcctctaaggtgctgtccgtggtactgggcactggtgcttctgggcctgtatttgcaagtgaggggccaataagacagaattaacataaattttttgttttgttttgtatttgataaatcacagctcaaaatatgtataatgaatggagcaggaattgaatttggatcttcagaccccaatttctgcagtgccctctctcacccctcctattcaacatagttttggaagtcctggccagagcaatcaggcaagagaaagaaagaaagggcatccaaacaggaagagaggtcaaaccatccttgtttgtagacatgatttcctatctagaaaacctcatagtctccacccaaatgatcctcaagctggtaaacaactttagcaaactttcaggatacaaaaccaatgtgcaaaaatcactagaactcctatatgccaacaacacgtaagcatatggccaaatcagaagttcaattccattcacaattgccataaaaaataaaatacctaggaataataaactacaacctgaaagtaaaatgggtcaccaatagctctactggagccacccacaaaaatttagccagggttctcactcttgttacatctgcttaaaccagcatgaccttatccaaaaatattgactcgatgtgtgccacttctgtttccataagtacttaaaggatataggtttcattaggttaggctaagtgatctgccttcaatttataagcaagacatccactcaatgaaagaaacagtcaatgaaagaaatccactcaatgagagaaagctaaccagtgggtgaaagatcgttacaaggataatttcaaaacactgcctaaaaaaacatagatgacccaaaccaatggaaaaacactccatgctcatgaatagcaagaatcattatcattaaaacagccatgctgcccaaagaaatatacatattcaatgctattcctattgaactaccaatgacatttctcacagaattagaaaaaaaaaaactattttaaaatgcacatggaaccaagaatgagttgattaaaaaagacaattctaaacaaaaagaacaaagctagaagcatcactttacccaacttaaaagtatactacagggccacagtaactgaacagtatggtactggtacaaaaacagacacatagacaagtgggacagaatagagagcccagaaataaggtcacacacctacaaccatctgatctttaacaaagctgaccaaacaagcactggaaaatgaactttctcttcaagaaatggttttgggataactggtagccatatgcagatgattgaaactgaatcccttccttgcattatgtagaaaaaatcaattcaagaggggttttaagacttaaatgtaaaacccaaaactataaaaaccctggaagtctacctaggcaatatcattctaaatgtaggaatggggaaaagtttcataacaaagatgccaaaagcaatcacaagaaaagcaaaaattgacaaatggatctatttaaactaaagagcttctgcacagcaacggaaactatcaacagagtcaacagacaacctacagaattggagaaaatatttgcaaattatgtatctgaaaaaggtcttatatctagcatctataaggaattgtaattactttacaagaaaagaacaaacaactgcataaaaaagtgggcaaaggggccgggcgtggtggctcacgcctgtaatcccagcgctttatgaggtggaggagagcggatcacgaggtcaggagattgagaccattccggctaacatggtgaaacccttctctactgaaaatacaaaaaattagccgggtgtggtggcacgcacctgtagtcccagctactcgacaggctgaggaaggagaatctcttgaacccgaaggcagttgttgcagtgagccgagatcgcgccactacactccagcctgggcgacagagcgagactcgatctcaaaataaaagtaggcaaagggctgaatgcggtggctcatgcttgtaatttcagcactttaagtggctgaggcaggtgcatcgcttgagcccaggagagaccagcctggacaacatggtgaaaccctatctctacaaaattagaaaaattaggcaaatgttaccccatgcaccagtaatcccagctactcagaaggctgaactgggaggatcacctgagcccaggcacaaattgcagtgagccgagattgctccgctgcacttcagcctgggtgtcagagtgagaccctgtctcaaagaaaagtagacaaaggacaggaacagacacttctcaaaagaagacatacatgtggccaaaaagcatatgaaaagaagctcaacatccctgaatgttagaaaaatgcaaatcaaaaccacaatgaaataccatctctcaccaatcagaatggctactcttcaaaagtcaaaaaataacagatgctagcaagcttgtaaagaaaagggaacacttacacattgttggtggtattagtttaaccatggtggaaagcaatgtgatgattcttcaaacagctaaaatagaactaccatttaacccatgtatcccatcactgggtatataccgagaagaatataaatcattctaccataaaaacatgtgcatgtgaatgtttattaccacagtattcacaatggcaaaaacatggaatcaacctcaatgcccatggaggacagactggatagagaaaatgtggtacatatacaccatagtattctatgcagcctcaaaaaagaatgagattatgtcttttgcagaaacatggatggagctgtagaccattttccttagcaaacaaatgtggaaacaaaaaatgaaatgctgcatgttctcacttagaagtgtgagctaaatgatgaggctcatggacaccaagaggggaacaacacgcaccggggcctacttgagagtggagggtgaaagatgggacaggagctgaaaaaatgactattgggttctaggcttagcaactggatgattaaatgatctgtaccacaaacgcccatgacacgagttttcctgcacatgtacccctgaatgtaaaataaaagtttaaaaaacaaagaaaaaaataatctcatctttcttctggaatctgcagcacaaccagtatccctgaaactttgatttacatggacaccaagagaaaggagagggtatagctagagcccagatgtgtgacagacagatgagagcagccctcacctggtagagccaatgggcctagggtggggcaggttcatgccaggactttctctacctctctcccagatcatcctgaggatcaagatcagtgctgtcccagaatgtttaaaggcagaaagaatgattaccttctagagccaacgactttaccaagaatcctcaccttaaaaaaatttatttttgtacaaattgagaaaatgtatatcttccgggtagattctctccggtgtagaaaaggtttgaggggcacaaaggctgtgctttaaaatcattcttccttgctccctcatcattatgcttgcatttccctggtaacccaatccacagcctagtacctctcccagtataatttcgctgcattacagacacaggcctgcaaacagctatggttttaactgagtttcttcctgacagctgagcctttctcaccctgcaagggaagcttgctgagaggaaattggaatcaggaatgaaagcagagggcatggtttacagggaccatttaaatgctgcaactcaaagattcacacagaagcccggacacaattccgaagttgcccagaggaagcaaaaatgtcagagctacaggtaagttgaataccctttatttctttctcctgcctgattgccctgaccagaacttccaacactatgttgaataggagtggtgagagaggcatccctgtcttgtgccagttttcaaatggaatgcttccagtttttgcccattcagtatgatattcgctgtggatttgtcataaataactctcattattttgagatacgtcccaccaatacctaatttattgagagtttttagcatgaaggttgttgaattttgtcaaaggtcttttctgcatctattgagataatcatgtggttttcgtctttggttctgtttatacgctggattacgtttattgatttgcgtacgttgaaccagccttgcatcccagggatgaagcccacttgatcttggtgaataagcttcttgatgtgctgctggattcagtttgccagtattttattgaggatttttgcatggatgttcatcagggatatttgtcttaaattctcttttttggttgtgtctctgccaggctttggtatcaggatgatgctggcctcataaaatgagttagggaggattccctctttttctattgattggaatagtttcagaaagaatggtactagctcctccttgtacctctggtagaatttggctgtgaatccctgtggtcctggacttttttggttggtaggctattaattattgcctcaatttcagagcctgttattggtctatacagagattcaacttcttcctggtttagtcttgggagggtgtatgtgttgaggaatttatccatttcttcagatttctagtgtatttgcatagaggtgtttatagtattctctgatggtagtttgtatttccgcgggattggtggtgatatcccctttatcattttttattgggtctgtttgattcttctgtttttcttctttattagtcttgctagcggtctatcaactttgttgatcttttcaaaaaaccagctccgggtaatggagtaatggatcttttcatatgcttagaagttgttaaagataatatcctgtgttttataatacctgtcctgctttacctttgtaagaatgcttgggtttcattttctgccaccattagcccaaatttgggctactgctcaacagtgaatggcagtcatggttcatggagctgaaatgaatgcattcaatgaacattgtcgaggactaaccctgtgagtggccatgtgcaagatgcaggaattcaagttcatgggcacagtcccttgccatggaaatcttctaggctagaggggaggctgagcaaacagggaccttatgacatggagtggtagagcctcaacagaagcttgtctactgggttcagttgtctgactaggagttttctcaggggaagttgtagtactaggacagagtggagaggaggctgaaagtttgtttggtttggtggtgtactgtctttctgatgcattttttccttttgtaggtaatggtaaatggccaacactgttacatatttgcccatcaactcctgcaagcatctgtgaatatgctctggatgtggagatgtctccatgagctcaacatctatgtgcagttgaaagagatgaccacaatccttgttgttgaggaatccctctttctacaagaccatgggattcccagagcctgttaacagaataatccctcctcaatcctttctatacacttggtcattaaaagttcggcaaattttccaggatttgatagtcatcccgacaggcgctgaaagattacatgggaagcattaagacatcaaagagtaaaaaccttcctatgactcaaggagtgagtaacacggtccctggaatgtctgagaaattaaaaacggcatccttctatagcacatagttgacatcaagcactcaactaaaacccttactcaatctcagatgactcattgcaaatgttgggtagctgtttacagccacacaggtataactggtagttttaagaagaaactgtaacattaggacaatcaggtggaatatcataattctacccgttgttccaaggatgcttactgtatatgaacactgtgcctcactctgtgcagactgccatgagggaactttagaaacagatgacaaattcctggccaggcgtggtggcttacgcctgtaattccatcactttcggagaccacggtgggcagatcacttgaagtgaggagtgtgagaccagactgcccaacatggcgatgccgtctctactaataatacaaaaattggctgggcgtggcagcaagcgcctgtaattccagctagttggaagggtgaggcatgagaatcacttgaacccagcaggcagaggtggcagtgagccgagtacacgccactacactccaatctgggtgacagagtaagactctgtctcaaaaaaaaaaaaaaaaaaaaaggcaaattacccacataaaaattttgctccaagcagtagttagagaatcacaaaagtttaatgatttctttcaatgatcctgattattcttgtttctaaatacttgaaatattttttcaatttatgtggacagaattctgggatttctctttggaaacaagtggtcatggttttcagatcagaaaatatgtagtttattgttgtaatagacacaattcatactacacacaggcacagtgaggagactctgctttgctgctgttacatttagacattgcagcacagcaagccttccaacacatattagctgaaagcaaccatttattctgatctctcccagctttgcaggtttactggacttatgaggttggtagatcatgtgctgggagtcacattttccaaagaatctgtggtctgggattccaggggatgcttcactcatgtctgactcaacactagggctgagtaaacacctgggggctggctggttatctccttctttgtctaaactctccattagtgccttgaatttcctcaaatcatgagagtctcatagttcttggacttaatggatggtgattggcttccaccaactaaagccttctgaaaggctcaaggagaaggtgtagggcattagagtacatagctttgaaaggcagacattgtcacttctatgacattatattgatcaagttgagtcatgcaggcagcccaaatcaaagaggaatccacaagctttggttattttgacttgtagatcctgagaggtcatccttggcaactatttccacgcagttccacacttatatgtgtaagtgtgtatataggcttacacacttcccacatactaaaaactctaaccctgtaaggaactactgaaagcaatacaattacaggaggcagctcagattgaagtccagcatcttatcatccaattactctcagatgtccatgaggagactacaaactgtcaggtgcactttctctcaaaatatgcaccaaagggatacatatttgccctatacaaatcaatcacacaagactgaaacagacaaaggaaaatgcagttaacacaactattttagaggggcaaaagataacaaatggcaccttttgcctcatagcactctgagaagcaagaggggtcaccagcagctctactagagccacttatgaaaattcagcctgggttctcactcttgtcgcatctgctcaaaccagcatagtctgttccggaaatactacctcaatgtgtgcccccagtgtttccataagtactttaaaaacatacatttcattaagttggactaagaggtcttctttgaatggataaccaaggcatccacacaacgaaagaaaccgtgttagctctttgtacataaatttaaaattcaaacaaacaaacaaacaagtacagaaaagaaaatagaccacagtcacggtccatatcactgaggaaaccaacaagatctcttttttcattttctctgggaacgtttccctgcagcaattggcttcatcctccattcttagcttcttggaactcctaccaagatggcagaatgacagtcctttttccactacaagagttttgattatctacttcatagtgcatatagagaaccatttaggagaagataaacaacatatttcctaaaagtcaacgaaggatgattgaagagagtctcatcaaatagccttttttctgctgggccaatctcaggcatcattttgatcatcgtcatcctctctccccaggttcattgccacagcttgttcaactccaaccttactcatgggtatgcctttctctgtactgcttctttaacctaacatctggataccttgaggtatcaatgcacagtgaattatgctcttcatgcctttcttccttgtttctttccagtataaaatgaaatttcctcccctctcattggaaactctcaggttctgattaggtacactctcctccttacaccatccctgtcacagtcctggtcaattctgtattttgatagtggattataggctccatcaccagcatggaattcatttgttggggatttaggcaattctttctctgagaggatgaagactatcctggaatctatgacttcctgagcagaacatgagtttgatttcatatctgcttgcctctggatgacacccattttatttgagtggcctacagagtcctacatgctggccttgcaacacacacagtgactcccatttcttggctgacattcaccagctcatttctgttcacatgggccatttgttacactcatttttatctcaggtaatacgttttgctcatggtggccaggatgacatctcagacacaaagagatgacatagaattcaggagccaatgtttaacaaagaatttttgaattgcctctggggacctactcaacatcattttcatactcctcaaccaaaattccctatcttctcccagcaaatacggcatgctcaaaacacagaaagtcgtacttggactctaaagctttcattctcaaaggtatttaggctttttagtttttgttgaagcctcccaaggaataaatctatttggtgataatattgtccttgtccctcaaagctgtttcacttgtggtgctgtccgtggtgctgagcattggtgcattaggccctgtatttgaaagtgaggagccaatacgacagagtaagagaggaattttgttttgttttcttttgtatttgctagaccatagacaaaacctccatgatgactaaaacagaaattcaacttggattttcaaaccacaatttcttcagtgccctctctcctcacttctatttaacataatattggaaggcctgaccagagcaatcacgcaagagaaaagaagaaagggtatctaaatacaaagagaggtcaaaccatccctgtttgcagatgtcatgattctatatctagaaaactccatagtcttcacccgaaagatccttaagctggtaaaccactttagcaaagtttcaggatacaaaatcaatatgcaaaaatcactagaactcctatatgccaacaacagcgacagggacaaatcaagaatgcaattccattcaaatttgccataaaaagaataaaacacctaaaaatacagctaatcagggaggtaaaagatcgttacaatgagaattacaaaacactactcaaggaaaccagagatgacacaaagaaatagaaaaacattccatgctcatagataagaaaaaccaattatcattaagacagccatactgcccaaagaaatttagatgcaaggctatttgtctcaaactatgaatgacattcttcacagaattagaagaaatattattttaaaatttaaatggaaccaaaaaaatgccaaataaccggggcaattctaagtgaaaagaacaaaactggaggcatcaaattacccaacttcaaaatatactacaaggctacagtaaccaaaacagcatggtatcggtatgaaaagagacacacagaccaatggaacagaatggaaagccctaaataaggccacaaacctacaaccatctggtcttcaacaaagctgaccaaacaagcaatggaaaaaggactccctattcaagaaatggtgctgggagaactggctagccatatgcagaagattgaaactggaccccttctttacaccatatacaaaagatagattaaagacttaaaagattaaacccaaaactataaacatcctggaagacaacctagacaataccatgtgggacataggcatgagaaaaatttcatgatgaagatgtcaaaggcaattaggagaaaagcaaaaattgacaaacagaatctaattaaactaaagagcttctgtacagtgaaggaaactatcaagagagtaaacagacagcctaaggaatgggagaaaatgttctcaaactatgtatctgaagaaggtctaatatccgagcatttataagaaatttcaacaacttcacgagaaagaaacaaacaaacccataaaaaagtgggtaaagagcttgacacagtggctcatgcctgtaatcccagcgctttgggcaaccaaggctggtggatcacttgagcccaggaatttgagaacaggctgggtaacatggcaaaaacccatctctactaaaaatagaaaaaaaaaatagcctagcatggagacatgcacctgtagtcccagctactcaggagactgagcttagaaaaatcacctgagccccggagccagaggttacagtgagccaagatggtgccacatcactccagcctgaatgtcagagtgagacctgttttaaaacaacaacaaaaaagttgagcaaaggacacgaacagacacttttcaaaagtaaggatacaggtggccaaaaaacatataaaaaagctcaatatcactgaacattagagaaatgcaaatcaaaaccacagtgagataccatctcacaccagtcagaatggctgttattaaaaagtcaaaaaaggacagatgcttcaaggttgtggagaaaagggagaactcacacattgttggtgacagtgtaaattagttcacccattgtggaaagcagtgtggtgattcctcaaagagctaacaatagatctaccattcaacccagcaatcccatcactgggtgtatacccagaagaaaagaaatcattctgccataaagacatatgcacatgaatgttcattgcaacactatgcacaatagcgaagacacagaatgaacccaaatgccaatcaatgacagatcggttacagaaaatgtggtacatgtacacaatgaaatactatgcagtcctaaaaaagaatgatattatgtcttttgcaggaacatggatggaactggaggccattattcttagcaaactaatgcaggaacagaaaaccaaatactgcatgttctcacttatcagcgtgaactaaatgaggaggctcatggacatcaagagggaaacaacacacactggggcctccttgagggtggaggatgaaaggtggaagaggagaaaaaaaataacttttgagtactacacttagtaaccaggtgaagaaatcatatacaccacaaatcccatgacacgactttatctgcatatgtaccccgaacctaaaataaaatgaaagaaaaatcaaataaaaacaacaatctcaccttcctcccagaatctgcaggagaaacagtgtctctgaaacttttatttacatggacaccaagagaaaggagagggtgtagctagagcccaggtgtgtgacagtcaggtgagagtggcccttacctggcagagccaagcagcctagtgtggaataggttcatgcaagaaatttctctgcttctctccacagatcctcctgaggatcaaggtcagtgctctcccagaacgttcaaaagcagagagaatcattaccttctagggctaatgtatttccccaaaatctccaacttttttcttttcagccgttgtacaaattgggaaaatgtacactttctgggtatattctgcatagatgagaaaaggcttgagaggcataaaggctgggctttacaaccactaccgctcactccatcatctttatctatgcatttccctggtaacccaatccacagcctggtaactcccccactgtcacttctgctgcattacagatacagacctgcaaatagctatggttgtgactgagtttcttcctaacaactaaacctgtctaaagctgcaaggaaatcttgctgggaggagcttggaatctggaatgaagcccgagggcaaggctgaagtgggtcatttaaatgctgcaactcagagattcactcagaagactggactcaattctgaaggtcgccaagaaggagagaacaatgtcttctttacccgtgagttgaaaaggcacagccttcaaaaatttcgtgtcacacaaaccaagaaagaaatgggagattttatgagatgaaaatatgagcatttttgctgtgaatgctttacttagagctattgaggtgtggaatagaaaccctgaggctatggtatctgagatgcttgtggggattgcggtgtggaccctggaccagtgtaaccttcggtgagtgtgaggtggtgtctgatgagcataaactctgcggagataatgtgactttaagtgggaggtggattacccaccaggacgagcaggtgtgtgaatggagagtaaaggggtgagtcggctttgtttcctgtctatgatgtgagtatgtgtgtgagcacagccagaccagtgcatgagcatcgttatgtgcacagtgagcaggtgtgtgtgacgcagtgagtggtgtggctctgtgtgactgtgagtgtgtgtgctgggatgtgactgtatgttgaagtgggatcatgcatgtggctttcttcacatgtgaatgtttctccccacacagcagcacctctgatgtgaatcccatgtggcttaactggtggggatcttggggattgtgagttaccaaggacttatttcagatcacttgtgagagcagaatgtatgatcagtagatgtctcttcccagtaagagtggggaagaggaatgcagactatgggggtgatggttcctcaggtggggtctgcacagagtgaccactgtctcttgcctcccaggctcagcttgcctgtccctagcccatccagttcttcccactgtgtgacaggagggtgtgcagatactggtttgttagggaaggacattagaggccgtgatttcagagactgaatcacacaaaatatccactgtaagctctgtctgaactgagactaaacttgttctacacccatgaaagaacaagttaagtctcagttcagaaggagcttacagtggatattaatcaaccaagcagctgggttcactggcttatggctataatcccaccaattttggaggcaaagatgagaggataacgaggccagaagtttgagaccagtctgggtatcagagtgagaccctttctttaaaaaactttaaatatttgactggcagagaggcaggtacctttcttcccagctattcaagagggagcagatgtgtgagattcactgcagcccaggagtctgaggtttcagtgaaccatgattgcatccctgcatgtcagcctgggtgacagagcaagaacctatctcaaaagtacagaaaaatcatctcatctacttgtagtcatcatagaaatcaatcattccctccagttatgtccctgacccacaagcttcatttgtgcaagtactggggctgtgctctcagtagtgtgtgccccttcttggaaggatgtccatggcccttgatgatagtgatgcatgtgcatcccacacacaggggtttcctgttctttcatcatttccctctccctttcaacaagtgttgtttctcactggagtgaatgtttaaattcttacatttacaagtcttgttttaattttcagagttgaaaatgaaggcaggtcagtctttcaagaggactctcctgtcctgttaggtcaccctaagaggccctacgcatgacagggattagggtaacacttttacatgtattaactccctattacggagaacatcctacaaagtagaaattcctgataatcctcgttgtcctagggaaaatgagggagagttcaagtagcaaatctaagactgcactgctagtaaaaggcagaatgaggactggaatccaggcatcctggctcctgaacccttgctctaacttatgggtccgccatatcttcaggaatatggggccctgaatgcggtagggttaaagaggagagtccacagagtctgccctttcatctccaacctcctgcaccatgagaatatgttacaggaggggagactgcacctgaccctgcacctctcacttactctcaatactctggcaggtgccatacaaactgcctgtgtctttgtctgttggttcctgcgtgataatcaaagggacaccaatccactcttttatgtgagtactccatggtccaatggaggggttggagaagaagggagaatatttgcgaagatttgaccttacatgtgggtgatgtggaaatgtctagttggcagaatggaggccccatgcaggtgcaggtcttggagaccctccagcaccaggcatgagacccacagcaactgcatgtgggccagccatggggcctacaggaggagaacactcagtgggttggggctgtggctctttatcagggggcatagaattttcgggaatgaacaagtcataggcccaggtcagtgactgtggctcagttttcatctggggatgaggagcacagaatctccctgcctgggggcatgaggagctgaagcatccccacagggacctggccatcagtattatctgggagactttttccctaggtaaatgggggaagggatttgtgtgtgtgtcgagtgtgtgtctgcgcaagggagggacctgcccaacattctgcgtgcttcaccctcagcaatgacccacagctgcaggtggatttctacactgacatggatgaggattcagatattgccttccgtttccgagtgcactttggcaatcatgtggtcatgaacaggcgtgagtttgggatatggatgttggaggagacaacagactacgtgccctttgaggatggcaaacaatttgagctgtgcatctacgtacattacaatgagtatgaggtgagcatcccaggagctcccagcacccaggctctgtgggctcccaaaacaggaggcagctctcattgatctggcctcagtagtccgtcagggtccatctcccataactactcctgcccctggttttcatcacagagcaccccctgcttgcactgccatcctcagctctttcccaaatctgaccaatgtcaaggtcagctcacctgacatttcccccaaagtagataatctcctctgtcttttcacatactgctcatttctacttatgccattatttaaattttcatttagctgagtgaatacaatatacttcaggaaaaaaaagtttaaaaaaaaaaggttgttttaatcagtcacaaattaagtctttgtctcattttggggcccgaattctaccataggaaaaacattaccagagctctgctttcattcaaagaggttttgtttgtttgtttgtttttgtttgtttgttttcttgagatagagtctcatttttcatccaggttggagtgcagtggcatgatatcagctcactgcaacctccacctcctggattcaaacaattctctcgcctcagcctcccaagtagctgggactacaggtgtgtgccagcacacctggctaatttttgtatttttaggggagacgggggttcaccactttggccaggctggtcttgaactccccacctcaagttatctgcccaatttggcctctcaatataatgggattacaggcttaagccaccatgcccagcccttcagaggaaatttttgcttatggaagcatatagatatgtctatgatttcatttgtttttaagcaaatcctggtataagttgctctacacattacgcttcaagaactaagttgatttgttgccaaagaatatatattgaagacattatcaatctgtcgtgctgcttcagtttttaaagattgcataatattgtgttaagaagtttacccaaagttgtggaacttggcccttttgggggcactaaatttccttccagtattttgctctcacaaatgatgtcgtattaagttttctaatcaatccttttgtcattaccaacctcccaatacttgtactagaagataattacaaaaaaatggaaaaactggctcaaaaatgtgtgcattttaaattcgaaaaattaatactaataaggttactttctctatagcctcaatataaagaatacatccatactttctggctttctctaacgagtaggccaaaacattcacatcttattcagattcaagcgagggatcttttcctatgcttagaagtttttgaaggtaatatcctgtttcacaagaacagttctcctttcattctataagaaccctgggtttccttctttgccactaacacctcagatgtaggttactccaaagagaaactgtgccatcagtagtgaaaaacaatcacagttcatggaactgaaaagtatgcattcaacgaacatggtctagcactaaccctgtggcaggtcctgtgcgagatgcagggtctcaagttcctgagacacagtccctggcgatggggatcttccaggttagaagggaggctgagtaagcaaagactttgtgacacagagtatagaacttcgctagaggaatgagtggaaacattagaaataaagtcgggtactgtctcaaataggcacaaaacgtcatctgtaaacataagtgtatctaatacgttaacttgtataactaggaattttcttggggaatgttatttgtaccaggacagagtggagaggaggccgaaaacttgtttggtggcatgctttctttctgatgcatttttcctcttgtagataaaggtcaatggcatacgcatttacggctttgtccatcgaatcccgccatcatttgtgaagatggtgcaagtgtcgagagatatctccctgacctcagtgtgtgtctgcaattgagggagatgatcacactcctcattgttgaggaatccctctttctacctgaccatgggattcccagaacctgctaacagaataatccctgctcacattttcccctacactttgtcattaaaacagcacgaaaactcacatgatttggttcttgctttcagaggggaaaagaggaagttgtcatccccaaggggggccagggcattctatgggaggcatcaggaaatcaaaggggataaaccttcctgtgacaaagggagtgagtgacaaggtccgtggaatgtctgagaagacattagaaacagcatccttctatagcacgtagttgacctcagacagtctgagctaaaatacttacccaatctcaaatgactcaaggcacttaaatgttaggtagctgtttacagccacgcaagtgtacatggtggctttggggaaaatctgtaactcgaggaaaattatgtggaatttcttaatttttttccattgttctcaggatgcttactgtgtatgaacactgtgcccggctttgtgcgggctgctgtgaaggaactgaagaaaaagatgacaagtttgcatgtgaagttttcaatccaagtaatagtttagagaatcactggagcccagtgatttcccttaaagaatcccaattattcttattttcaaatatttgaaaattgcttcattttatgtggggagaatccaggggtttctctttggaaatgaatggtcatgatttgagatcagagaacatatagattattattggaatagatacaagtcacgtacattgacacagtgagcagacccttatttgttgcttttccagtgatgaattgcagcacagcaaacctcacaacacacatcggctaaaagcaatcatttattttgatctctccccgcttcacaggtttactgaacttaagtgagtggtagattatgtgacgggagtcgcgttttctgagagatcttttaggctgggatttcagaggatgctttactcatgtccaactcaacagcaggactgggtgaacacatagaaactgggaagctgtctccttcaatacctcaccttcccatgcatgacattaatttcctaaaatcaggagagtctcatggttctgggacttaataaatggtgattggctttcaccaaagaaagcctttcaaaaggctcatggagaaggtgcacagcatcacaggacttacctttgaatggcagacagtgttacttctaaggttttacattgatcaaggtgagtcatacagacggccctaatcaaaaggagaggactccacaagctgtggttattgtgactgtagtcatgaggggccatccttggcaactagttccactcagaactagttcccacataccgaaaacactaaccatgtaaggaatctcaggctgggcgcggtggctcacgcctgtaatcccagcactttgggaggccgaggcgggcggatcacgaggtcaggagatcgagaccatcccggctaaaacggtgaaaccccgtctctactaaaactacaaaaaatagccgggcgtagtggcgggcgcctgtagtcctagctacttgggaggctgaggcaggagaatggcgtgaacccgggaggcggagcttgcagtgagccgagatcccgccactgcactccagcctgggcgacagagcgagactccatctcaaaaaaaaaaaaaaaaaaaggaatctctgaaggcattacaattgcaaaaacaggctcagagtaaagtgcaatatcttatctgatcaggacaccgtgtctatgatgtgactacaaattatcacttgcaatcccctgcaacatgtgcaccaagggggcacattatctgctttatactaatcaaagaagactgaacgagacaggaaaagtgcaatgaacacatatattttagatgggcaaaaaaaaaaaaaaaaaaaaatagacagcagtcactaatccatatttttgctgaaaccaaccagaaaactatttacattttctctgggaatgtttttctgtagcacttgtccccaccctccattctcagtttcttggagttcctaccaagacggcagaatgacagcccttttcccactataagagctgtgattatctacttcatagcatgtatggaaaaccacttaggagaacagaaacaacatattacctaaaaatccatgaagctagaatgaagagagttccagaaaatagcgtctttgtttgcaaggaccatcttaggtgtcattttgatcattattttctctccccatgttcattgcaacagtttctgcaactccaacctcactcatgggtatgcctctctccttacacttcctttaacctaacttccagacactttgaggtgccaacgcacagtgaatgaaactcttcatgcctctcttccttgtttcattccaggatggaataaaattccctgccctctcactggaaactcttgcgttctgattaggtacactcttctccatacacttatacagtcttgatcacttctcattttgataatggatcatagaccctatcaccagcatggaattcatttctttgggaactatgcagtttgtgctctgagtggatgaaacctatcctggaacccctggcttcctgaacagaagacaacttggagtttatatctacttgctgcttgcctggcgcccattttatgtgaataaccaacaaagtcctaaatttcagccctgctaggcaaacacacagtgactgccctttcttgaatgatattcaccagctcagtgcacttcctatgggccattcgttacattcatctttattcagctactactctgagctcatagtggccaggaatgacatctcagatacaaagagatgacatagagtccagggccaatgttcaactaaaaatttttgaattgcctctggaaacctattcaacatctttcttcatcctgctcaatccaaattcatgatcttctcccagcaaatagggcattgctcaagaagcagaaagccatttctgaactctaaggcctcctcatcttaggtcttttggtcttcccagttattgctgaagcccccaaagaataagtatactctgtgataatattgcccttgaagcccagttccctcagcattgctattcctttgggatgccatctgtgatgctactaaacactggtgtatgttggcctctatttgcaagtgaggggtcaagaagatggaataaaagagaaatttaaaaaattttccccaatttatttatgtttaccatttttatttgaagttcaagtgtacatgtgcaggtttgttatataggttaatcctttgtcatgcgtgttagttgtacagattatttcatcacccaggtaactaaacaaagtacccaatggttattttttctgctcttctctcttttcctacccctccactctcaggtaggccccagtttgtgttgttcccttctttgtgtttatgagttctcatcatttagctcccacctataagtgagaacatgcagtatttttttctggtcctgcattactttgctaaggataatggcctctagctctacctatgttcccgcaaaagacatgaccttgttctttttatggctgcatagtattccatggtgtatatgtaccacattttctgtattcagtcagccattaatgaacatttaggttgattccatgtctttgctattgtgaacagtgctgcaatgaacacttgtgtgcatgtgtctttatggtagaatgatttatattctaatatttatatgtatttttatttcaataatttttgggacccaggaggtttttggttgcatggttacattctttggtggtgatttttgagactttgctgtacccataacctaagcagtgtacactgtacccaatatgtagcattttatctgtcacccctcccacccttccttcgagtctccaaagttcattatatcatcttaatgcctttgcatcctcatggtttagctcccacttatgagtgagaacatacagcatctggttttttattcctgagttgcttcacttagaacaatgacctccagttgcatccaagttgctgcaatggccattatttctttctgcttttatggctgagtagtattccatggtgcatatttaccacatgttctttctccatttattgatccatgggcacttaggtagattccatgccactctaaacatgtgtgtgtatgtctcttttctatataatgacttcttttcttctggataggtacccagcagtggaattactggatcaaatggttgttctgctttcagttcttgaaagaatctccatattcttttccacagtggttgtactagtttacagtcccacaagcagtgtaaaagcattccattttcaccacatccacaccaacatatattcttttttaatgttgtatttatgatcattcttgcaggactaatttggtatctcgttgtgggtttaatttgcatttcactgatgattagagatgttgaacattttttaatatgtttattggctgcttgtatatccttttttgtctccgtactaaaacattattttatttttatgttgtttttgaacctattaattcagtttatttttttccataaattattggggtacaggcggtatttggttacatgaataagttatttattggtgatttgtgagattttggtgcacccatcaaccaagcagtatacactgcattatatttgcagtctcttatccctcacccttccccaacacttcccttcaactccccatagttcattatatcatttttatgccttggtgtcctcatagcttagctcccacatatcaatgagaacatatgatgtttggtttttcattcttgagttacttcacttagaatgatagccttcaaattcatccagatcactgcaaatgctgtgaatttattcctttttatggctgcatagtattctgttatgtgtgtgtgtatatatatataccacagtttctttatccactcgttgaatgatgggcatttgtgttggttccatgattttgctactataaattgtgtcacagtaaacatgggtgtgcaaggatcctttttgaatattgacttcttttcctctgggtagatacccagtagtgggattgctggatcaaattgtagttctactttttgttctttaaagaatctccacactgtcctccatagcaactatacttatttacattcccaccatcagtatagaagtgttccctcatcaccgcatccatgtcaaatctactgttttttgtttgtttggctggttggttggttgaaaagttggttggttggttgtttattatggccattcttgcaggagtgaggtgttatcacattgtggttttgatttgcatttctatcatgattagtgatgttgagcattttttcatgtgttgtttgtccaattgtatatcttctcttgagaattctctattcatgtctttagcccatttttcaatggaattgtttgtatttttcttgctgatttgtttgagttctttgtaaattctggatattagtcttttgtcgatgcatagttgtgaatattttttccccactctgtgagtggtctgtttactctgctgattatttcttttactgtacagaagattttagttaggtctcatttatttatttttgttgcatttgcttttgggttcttaatcatgaattctttgcctaagcgtctagaagagtttttcaaatgttatcttcttgaatttgaatggctccacatcttagattcaagtctttgatccaccttgagttgatttttttataagatgagatgagaatccagtttcattcttctacatgtggcttgtcagtgttcccagcaccattcattgagtgcggtgttcttcccccactgatatggtttggatctgtgtcctctccctaatcttacatcaaattgtaatctccaacgttggaggagggacagtgaggtccaggctgatgaggtctcaggtggggataaagaacttattggaagttggaataagggtcactcttaccatgctttagcaaagagactggtagcattttgtccctgctctatagatctgtggaacttcaaacttgagaaaggtgattaagggcatctggcagaagacatttctaagcagcaaagcattcaaaagtagcttgacagcttctaacattgtatggtcatatgcatgaaaaaagagatgatctgaaactggaacttatatttaaaaggggagcagagcataaaagtttggaaaatttgtagcaagatcatgtggtagaaaagaaaaattcattttctggggaggaattttcaagtttgctgcaaacatttgcataagtaaagaggagccaaaacaacaaatgcctcaaaggcatttgttgatcttcacggcagcccctcccatcataggcccagaggcccaggaggaaagaatggttctgtgggctgggcccagggccctactgccctgcacaatcttgggacactgctccctgagtcccaactgctccagcttcagccgtggctaaaagtgtgccaaacatgtctcaggctgctacttcaaagggtgcaagtcataagccttgaaaacttccatgtgattttaagcttgtggtgcactgaaggcaagatctgaggcatgggagcttctgcctaaatttcagaggatgtatgggaaagcctggatgtccaggcacaaatctgctgcaggggcagagaccttacaaagaacctctactagggaagtgcataggggttgagcccccacacaagaccacactggggtactgcctagtggagctgtgataagagggctaccatcctccagaccccagaatggtagatccactgacagctcacaccatgtgctgggaaaagctgcaggcactcaatgctagcctgtgaaaacacccatgagagctctaccctgcaaagccacataggcagagctgcccaaggcctggaagaccacccttggcatcagtgttggctggatgtgagatatggactcaaaaaagattatttttgagctgtaagatttaatgactgccatgctgggtttcagacttgcaggggcttggagcccttttgttttggcagatatttcccttttggaaaggaagtatttacccattgcttatacctccattgtatcttggaagtaattaccttgttttttattttacaggctcataggttgaagggatttgcattgtctcagatgagactttggactttaggcttttgaattaatgctgaaatgagttaagactttggggaactgttgggaaggcatgattatattttgcaatgtgagaaagacatgagatttgggaaaggccaagggtagaaatgaatgatttgggtctgtttccctgttcaaatctcacaacaaattgtaatcctcaaggttggaggaaggtagtagggggaggtgattggatcatgagggtggatttcccttttgctgttctcatgacagtgagtgaattctcaaagatctggtcatttaaaagtgtgtaacacctctttctttgttctctctttctcctaccatgtaagacatgccagcctcctctttgccttctgcataattgtaagcttcttgaggcctccccaacaatgcttcttatacagactgtggagttgctagccaattaaacctattttatttataaattattcattgtcaggtatttctttatagcagtgcaagaatggactgatacatccacttcaagcttttgtatgctttgttgaagatccattggctgtaagtatttggctttatttctgggctctctattctgttattggactacatgcctaatttttttttaccagtacctgctgttctgttaactattgccttgtagtttaatttgaagttgggtaatgtcacacctccagatttgttctttttgctttgttattgctttctctatgtgggctctcttttgattttgtataaattttaggatttttttttgaagttctttgaaggatgatgatggtattttgatgggaattgcattgaaactttagattgcattgggcaatatggtcattttcacaatatttattttacccaatcatgagcattgggtgtgttttcatttgtctgtgtcatctatgattttagagacgagctctggctctgtggtccaggttggaataaagtggtgtgatcatggctgtctgcaacctcaaactcctgggctcaagtgactcttctgccttggcctccaaaagccctgggattacagtcatgagccaccacacctaaacccatggaccattgttttttaaaagaaaaacaagttcattaaccctaagggtagcctccaggagttaggatatggcgttaaccaattaatagtgacttatgcatggaggaagaaaggaaaattaggaagacaaatctcttataattttcatcatacaatcttggttacaaacccagtcggtagaatgcagtcaatgacctgctgacatgggggtacaaaaggccacccttttacctcaaagagcaactctgctgtgcagttcacactccagtgcttcttcctgaaataagactaagctacatctagctgttccaattctgttccaactaagcagccactctctaaccactgacaatccctaatctgttcttctatctctatgatttgcatatcctggacatttcatgtaaatgaaatcatacaattggatttttgtgtctggcttttttccacttaaaacattaaacacataatgttttcaaggttcatttatgttgtagcatgtatcagtattccttctttttgtagctgaataatattccattttgtgaagatatcacaatttgtttatcctttcagcagttgatggacaattgggttgtttctactctttgactattgtgaatagtgatcctatgaacatttatgtacaagtttttgtttgaacacctgtatccaagccaagaagttgaattgttaggtcatattatacttttatgtttaactcattaaggaaccacaaaactattttccacaaaagtgatgccattttacatttctgtcaccaatgcactagagttctaaaaattttctgcatcctcaccaactcttgtttttcctttttaaaattataaccatcctagtgggtgtgaagtagtatctcatcgattattttgtgtgtgtgtaattttatttattaattgtttaattttttattttcatacatttttggggaacaggtgatatttggttacatgagtcagttctttagtggtgatttgtgagactttggcacacccaccacccaagcagtatacactgaacccaatttgtagtgttttatccctcaccttcttcccacactttctccttgagtttccaactttcattgtaccattcatatgcctttgtttcctcataatttagctcccacttatgcgtgagaacaaacaatgtgtggtttttcattcctgacttacttcacttagaataatagtctcctatctcgtccagattgctgcatatgcaattaactcattcctttttctggctgagtagtattccattatatatatcacagtttctttatccattcattgatgagtatttcagctggttccacatttttgcaattgtgaattgtgctgctataaacatgcgtgtgcaactatcttttttgtataatgacttcttttcctctcagaagatacccagtagagggattgttggatcaaattatagttctacttttaattcctgaaggagtcttcacattgatttccatagtggttgtactactttacatttccaccagcaatgtagaaggtccgttttcactgcatccacaccaacatcttttattttttggttattttattgtggcctttcttactggagtaaggtggtatcgcattgtggttttgatttgcatttccctgatcattagtgatgttaagcaggctttcatatgtctgttggccatttgtatatcttcttatgagaattatctgttcattttcttagaccacgttttgataggattgtttgtttttttcttgctaatttgtttgggtttgttgtaaattctggatattagtcctttgttgaacatatagattgtgaaaattttctcctactctgttggttgtctgtttattccgctgagtgttccatttgctatgcaaaatgcttttctttaattaagcctcatctatatatttttgtttttgttgcatttgtctttgggttcttggtaatgaaatctttgtgtgcagactcaacaggcagggaggcatgaaaaccttgcttgctttcttagatggaaggctgttagcctgggacaagttctcagcccttgtcacccactgcctggaaacaaactcagtgctgttggggacagcacaacgggagtgagaccagccttttgggttgcaggggagatggaggaggcctgtaactgccagctttcccccacttagatgacaacctgtatgatacagcagaggcagccataattcttctgggaaaataacaccactcatctcagaaccacaccctgaacccccaccacagccacagcaagccccacccaaggagcccaaagaggatctgtgctcagacatgcctaacactgtccccatctgatggtcctttctgacccactttggtagctgaagatagatgtcctatttttgatttgcatttccttcatgactaatgacattaaataccttcttgtgtgcttgatggccatttgtatatgtttttgcagacatgtcatttgctcatttttaaattgggttgcttttctttttgctgtttagttgtgaaagttcttcatatattctgaatactagacacttaccaagtgtatgatttgccaatacatattttccattctgcaggttatcttttccctcactttatagtgtttttaatgcataaaaatttttattttaatgtggccaaatttattatttttttttattactcgtgcctctggtatcatgttgaagaaaccattgccaaatccaagatcaggaagattcattcttatatttactgtgagtatttggcagttttatctcttacatttgggttgttgacacattttgagttaatttttttcaattataatttaagttctggggtacatgtgcagaacattcagttttcttacataggtatacatgtgccatggtggtttgctgcacccatcaacctgtcacctgcattaggtatttttcctaatgctacccttcccctagcccaccactccctgacaggtcccagtgtatgatgttcccctccctgagtccatgtgttctcattgttcagctctcacttataagtgagattatgtggtgtttggttttctgttcctgtgttagtttgatgagaatgatggtttccagcttaatccatgaacttgcaaaggatgtgaactcatcctttttgtatggctgcatagtattccatggcatatatgtgccacattttctttatccagtctatcattgatgggcatttgggttggttccaagtctttgctattgtgaatagtgccataataaacatacatgtgcatgtgtctttatagtagcatgatttataatcctttgggtatatacccagtaatgggatcgctgggtcaaatggtatttctagttctagatccttgaggaatcaccacaccatcttccagaatggttgaactaatttacactcccaccaaccgtgtaaaagctttcctatttctccacatcctctccagcatctgttgtttcctgacttatggatgatcaccactctaactagcgtgaggtggtatctcactgtggttttgatttgcatttctctaatgaccagtgatgatgaggtttttttcatatgtttgttggctgcatgaatatcttctttccagaagtgtgtgttcatgtcttttgcccaatttatgacgggattgtttgtttttttcttgtaaatttgtttgagttctttgtagattctggatattagccctttgtcagatggatagattgcaaaaattttctcccattctgtaggttgcctgttaactctatgatagtttcttttgctgtgcagaagctctttagtttagttagatcctatttgtcaattttggcttttgttgctattgcttttggtgttttagtcataaagtctttgcccatgcctatgtcctaaattgtattgcctaggttttcttctagaatttttatggttttaggtcttacgtttaagtctttaatccatcttgagttaatttttgtataaagtgtaaggaaggggccaatttcagttttctgcatatggctagccagctttcccaacaccacttgttaaataaggaaacctttggtaccagtaccatgctgttttttgtttgtttgtttgtttactgtagccttgtaatatagtttgaagtcaggtagcttgatgccctcagctttgctcattttgcttgggattgtcttggctattaaggctcttttttagttccatataatgtttaaagtagttttttccaattctgtgaagaaagtcaacggtagcttgatggggatagcattgaatctattaaattactttgggcagtatgacctttttcacaatattgattcttcctattcataaacatggaatgtttttcgatttgtttgtgtcctctcttattgccttgagccgtggtttgtagttctccttgaagaggtccttcacattccctgtaagttgtattcctcagtattttattctcttgatagcaattgtgaatgggagttcactcatgatttggctctctgtttgtctgttattggtgtataggaatggttgtgatttttgcacattgattttgtatcctgagactttgctgaagttgcttatcaacttaaggagattttgggctgagaaagtggggtttttaaatatacaatcatgtcatctgcaaacagagaaaatttgacttcctctttttctatttgaatatcatttatttctttctcttgcctgattaccctggccagaacttccaatactatgctgaataggagtggtgagagagggcatccttgtcttgtgctggttttcagaaggaatgcttccagtttttgcccattcagtatgatattggctgtgggtttgtcataaataacttattattttgagagatgttccatcaatacctagtttattgagagtttttagcataaagggatgttgaattttgtcgaaggtcttttctgcgtctgttgagataattgtgtggtttttgtcattgattctgtttatgtgatggattacgtttattcatgtgcgtatgttgaaccagccttgcatcccatgtatgaagctgacttgatggtggtgtataagctttttgatatgctgctggatttggtttgccagtattttattgaggattttcacatcgatattcatcagggatattggcctgaaattttctttttttgttgtgtctctgccaggttttggtatcaggaagatgctggcctcataaaacgagttagggaggattctctctttttctattgtttgcaatagtttcagagggaatggtgccagctctgctttgtacctctggtagaatttggctgtgaattcatctgcttctggactttttttggctggtagtctattaattactgcctcaatttcagaacttgttatcggtgtattcagggatttcacttcttcaaggtttagacttgggagggtgtatgtgtccagaaatttatccatttcttgtatatttgctagtttatttgcatagaggtgtttatagtattctctgatggtaggttgtatttctgtgagatcagtggtgctgtcctctttatcatttttattgcatttatttgattcttctctcttttcatttttattagtctggctagcggtctattttgttgatcttttcaaaaaatcagctcttgggttcattgatggttagaaaggtttttcgtgtctctatttccttcagttctgctctgatcttagttatttcttgtcttctgctagcttttgaatttgtttgctcttgcttctctagttcttttaattttgatgttagattgtcgattttagatctttcctgctttcccttgtgggcatttagtgctataaatttccctctccacactgctttaaatgtgtcccagagattctgctatgttgtgtctttgttctcatttggttcaaagaatatctttatttctgccttaattttattatttacccagtagtcattcaggagcaggttgttcagtttccatgtagttgtgtgattttgagtgagtttcttaatcctgagttctaatatgatagcactgtggactgagagatgtttgttatgatttccattcttttgcatatgctgaggagtgttttacttccaattatgtggtcagttttagaataagggcgatgaggtgctgagaagaatgtatattctgttgatttggggtggagagttctgtagatgtctattagggccgcttggtccagagctgagttcaattcctgaatatctttgttaattttctgtctctttgatctgcctaatattgacagtggggtgttaaagtctgccactattattgtgtgggagtcagagtctctttttaggtctctaagaacttgctttatgaatctgggtgctcctgtattgggtgcatatatatttaggatagttagctcttcctgttgcatttttccctttatcattatgtaatgcccttctttgtctcttttgatctttgttggcttaaagtccattttatcagagaccaggattgcaaattccgctttttttttttttttttgctttccagttgcttggtaaatattcctccatccctttattttgagcctacatgtgtctttgtatgtgagatgggtctcctgaataccgatgggtcttggctcttaatccaatttgcctgtctgtgtattttaattggggcatttacctcatttacatttaaggttaatattattatgtgttaatttgatcctgtcattatgatgctagctgattattttgcccattagttgatgcagtttattcatagtgttgatggtctttacaatttggtatatttttgcagtggctggtaccagttattctttccaagcttaatgcttctttcatgagctcttgtaaggcaggcctggtggtgacaaaatctctcaacatttgcttgtctgtaaaagattttatttctccttcacttatgaagtgtagtttggctggatatgaaattctgggttgaaaattcttctatttaagaatgttgaatattggcacccactcttttctggtttgtagggtttctgctgagaaatccactgttagtctgatgggcttccatttgtgggtaacccagcctttctctctggccgcccttaatattttttccttcatttcaaccttggtgagtctgacaattatgtgtcttggggttgctcttcttgaggagtttctttgtggtgttctctgtatttcctgaatttgaatgttggcctgtcttgctaaattggggaaactctcctggataatatcctaaagagtgttttccaacttggttccattctcctcatcacttttcaggtacaccaatcaaatgtagatttggtcttttcacataatcccaaatttttggaggctttcttcattccttttcattctttttctccaatcttgtcttctcacttcatttcataaagttgatcttcagttgctgatatcctttcttccactcaattgatgaggctattaatacttgtttatgcttcatgaagttttcatgctgtgtttttcagctccatcgggtcatctatgttcttctctaaactggttattctagttagcaattatctagccttttctcaaggttcttagcttccttacattgggttagaacatgctcctttagctcagaggagttattaccaaccttctgaagcctacttctgtcaactcgtcaaactcgttctctgaccagttttgttctctggctggtgaggggttgtgatcctttggaggagaagaggtgttcttgtattttgaattttaagcctttttgtgctggtttctccccatcttcatggaattatctaccttggtctttgatgttggtgaccttcaggtggggtctctaacggtcagtcccctctgctgcaggtatgatggagtttgctcgaggtccactccagagcctgtttgcctgggtatcaccagtggaggctgcagaacagcaaagattgttgcctgttctttcctctggatgctttgtcccagaaaggcccctgccagatgtcagccagagatctcctgtatgaggtgtcactgagaggtgtcttgcagtcaggaggcacaggggtcagggacccacttgagtaggcagtctgacccttggcagagcttgaaccctgtgctgggaggtctgctgccctcttcagagccatcaggcagggtcgtttaagtctgctgaagctgcacccacagctgcccattcccccaggtgctctgtccaagggagatgggggttttatctataaatccttgcctggggctgctgccttttttttagagatacccttctgcagtggccttgctgagctgtggtgggctctgcccatttcgaacttcccggtggctttgtttaccctgtcagtggaaaaccacctactcaagcctcagcaatggcagacgcccctccccccaccaagctcgagtgtcccaggttgagctcagactgggagaatttcaagccagtggatcttagtttgctgggctccatgggggtgggacccgccaaaccagaccacttggctccctggcttcagtcccctttacaggggagtgaatggttctgtctcactggcattccaggcaccactgggttatggcaaaaaaaaaaacaaaaaacaaaaaacaaaaaacaacttctgcttttgtgcttgaaacccagggccctggtggtataggtaccggaggtaatctcctggtctgcgggttgcgaagacagggaaaagcacagtatctgtgcggagctcttcattcctcaggcacagtccctcacagcttcccttgggtaggggggataatcccccaaccccttgcacttcctgcgtgaggcgatgccccaccctgcttcagctcgcccttcatgggctgcacccactgtccagtagcgatgagatgaaccgggtacacattttgagttaatttttgtgtatggtataaggtgagggttcagcttcattgttttacatgtactgaatatacattcagtacaacaaacctccttgacctgtataacaagcctgcacatcctgcacatgtacccctgaacttaaagcttaaaagctaaaaacaaacaaacaaacaaaaccaacaaggctgggagctgtggctcacgcctgtaatcccagcactttgggaggccgaggcgggtggatcacgaggtcaggagatcgagaccatcctggctaacatggtgaaacccccgctctgctaaaaatacaaaaaaaaattagccgggcatggtggcgggcgcctgtagtcccagctactcaggaggctgaggcaggacaatggcgtgattccgggaggcagagtttgcagtgagcagagatcacgccactgcactccagcctgggcacagagtaagactccctttcaaaaaaagaaaagaaaagaaaagaaaaccaacaaaacaaaaataatttattcaagagacaattccttcccacattgaatgatcttggcacccttgttgaaatcaatttacaatggatgtttaggtttatttctggactctcaattctgttccattgatctataagtttacctttaagccaatatcaatgtattttgattactgtagtttcattatcacagcattaactttgacatctgggatttgttgagaccatgcagtcagcttcctttgcagatatgccatgttttttgaaattacatcctccatatgagtttcagcactcagtactctcttccctgtgcttgcaggatgtgagggtttctttaaatgctatcaccaggaacatctagtgttcaaaatgtgccttgaattggtagttggtgggcactaatgtgtccctctttttctttccttctttctttcattctttctttttttaaaaagaatttcaatgcagttaaaaccaaagcaagtacttccacaatcctgtgattaccattgtacccctacaattctagtgccacagctactgaagtcattcgccttctctcagcactttctgtcaataaagcacaggtgactattcttagtagttgtgatactaataattgtaatacaaagcaatatttagtaactgtgatacttactatgtcatgggtaatcactatgtcacttaccagcaatggatctttactgtgatctgcccaataagagatttaggctcccataataaggatccagcttctttctatgacttttttctggcctaaagttggtttccacccttctccatcaaatatgaaatgtttcttagtactctctgcccagaagatgaaaggaagtatttatccatctgcccccatccccagttgttaaaaagtcatcctgttggcattaagtctcccacaactttggtttgcagatgcatgggtgctgagaggatttctgcaagagtcctattctaccatctcaaaggagcccagtgctggaaagaggaaggtactggaaagataaatactaaggagaggcactgtcagtgtgcacctgcatgaagctagtgaaaaactgtctagacctggtcaacttagtaatggctggatgaagaggtggggctgagaggatatcatgtggtacaggaaaagcctgatatactgacctcctttcaatttctcatacacaccaagctcattttcatttttggagcatcttatatgacaaattcaaaaagcgtcaaaaatatcataacaaggcagggagaatgttctagtttaaaagagactaaaaaagcgtagcaacagagttcatgaaacctgattgagtgatggattttaaaacagctataaaggacatgcttttgtacaattggggaaattaaaatagtatcgtaaattagaagttgattcttaggtggtggtagaatagaacttctatcagtcttgtggatctgaagatacagaaattgtacgttggtgcccgccaagtggaagagagagttaggctttcagttggaaccctgaaagggatataccccagagcggggttccccaactcacaagccacagaccaataacaatctgtgacctgataggaatggagccacacagcaggaggtgagcatcaggtaagcattaccccatgagtggccttatgacagatcagccaggcattagattctcataggagcacgaattagaatttcactaccagaattccacattacgggtgccacagtgtgtagttttattgcaaatagtagcatgactataacaattgccacaagagtggtgtagtaaaaaaaattatttaaaacttacttgcccaacgtaaaacatttccctttggggatttacagagttacaatagcagtttcatgtataattaaaatttcctgcaaatacgaattaaaaataagttttattatttggtggcaaattttgagagtaaagtgtggaaatgacaaatattatctgttgaagtaaatgtgggactgagtaagataagtagcctttagttacttaatttttgtgatttttagcttatgattttttatttttccacaactgatgttctggacaattctctgggctgttaggggttgctccctcagctttttaggctttgacttgaggtgatgtatttaggagttgattcctgtaacttttgcttctaagagcgttgaaataagaacaatgtagggcccttcccagcttggcttaaggaagaagagagaaagactaaatttcctgggttagatagaggtggttttatttctttggacttttctagttgtgttaatggcttgaggcttccttgcctctggcttagctggctgatcagctaatttatttcctttggctaccttatttattctcttttgatgttccctacaatgcatccctgctatttcgtgtgtaagaaaaagtaaggataataacctgttaatttcctggtgatattttatgggagattcattagtggtaagaaaatgcctttccttttaaatggcagcatgagcatggacaattaggaaagcatacttggagttagtataaatgttagctaccatttccttgcttaacttaagtgctcttgtaagagctattagctcagctaattgagtgcttgtgtttggggagagtgactactgcttatcctgtcttatgtacttcttgctttacaggctgtttattagctaagagctccccttagaggacagtgatcctgccacattatgtgggctgtaaacagttgaattatttcctagggttaacttggaggcttttctgactagtagagctaatatgacaatgacttggaagcacgtgtaaataggtctttctaactacaggtaaggtggagaaaactattggattcgagtttttcctgagatgccctttactgttgtgctatctttttttttaattattatactttaagttttagggtacatgtgcacaatgtgcaggttagttacatatgtatacatgtgccatgctggtgtgctgcacccattaactcgtcatttaacgttaggtatatctcctaatgctatccctcccgcctccccccaccccacaacagtccccagagtgtgatgttccccttcctgtgtccatgtgttctcattgttcaattcccatctacgagtgagaacatgcggtgtttggttttttgtccttctgatagtttactgagaatgatgatttccaatttcatccatgtccctacaaaggacacgaactcatcgctttttatggctgcatagtattccatggtgtatatgtgccacattttcttaatccagtctataattgttggacatttgggttagttccaagtctttgctattgtgaatagtgccgcaataaacatacgtgtgcatatgtctttatagcagcatgatttatagtcctttgggtatatacccagtaatgggatggctgggtcaaatggtatttctagttctagatccctgaggaatcgccacactgacttccacaatggttgaactagtttacagtcccaccaacagtgtaaaagtgttcctatttctccacatcctctccagcacctgttgtttcctgactttttaatgattgccattctaactggtgtgggatggtatctcattgtggttttgatttgcctttctctgatggccagtgatggtgagcattttttcatgtgtctctttggctgcataaatgtcttcttttgagaagtgtctgttcatgtcctttgcccaccttttgatggggttgtttgttttttccttgtaaatttgtttgagttcattgtagattctggatattagccctttgtcagatgagtaggttgcgaaaattttctcgcattctgtaggttgcctgttcactctgatggtagtttcttttgctgtgcagaagctctttagtttaattagatccatttgtcaattttggcttttgttgccattgcttttggtgttttagacatgaagtccttgcccatgcctatgtcctgaatggtaatgcctaggttttcttctagggtttttatggttttaggtctaacgtttaagtctttaatccgtcttgaattaatttttgtataaggtgtaaggaagggatccagtttcagcttcctacatatggctagccagttttcccagcaccatttattaaatagggaatcctttccccattgcttgtttttctcaggtttgtcaaagatcagatagttgtagatatgcggcgttatttctgagggctctgttctgttccattgatctatatctctattttggtaccagtaccatgctgttttggttactgtagccttgtagtatagtttgaagtcaggtagtgtgatgactccagctttgttcttttggcttaggactgacttggcgatgcgggctcttttttggttccatatgaacttgaaagtagttttttccaattctgtgaagaaagtcattggtagcttgatggggatggcattgaatctataaattaccttgggcagtatggccatttttgcaatattgattcttcctacccatgagcatgtttgtgctatcataaaggggaggtctggattagagagaagaaaagagagagatgggctctagtgtttaggaggaggtttactttcctacccttaatttccagaattatccagggctcctgtgctataagggcaatctgagcccctggagctaaggtttaagccctgggacccatcagtcctgctgaaccatctgtgagactggttttgaacccagtgacctctgcctctgggggcagttctgtttccagtggttttgccacagcccagacagggttgaggttgcttcatcttgctgcctgggcatttcttttaaaaatgccctggcctgccatgccaataggaactagcagatgcactttggggattctggactttacaagcttgtaaagctgctgctgaagcctctgttgttctcctgaaattttcccctttttgggggactcttcctggtacctattataaaagaaaaaagtcaccaccttcaggaggttctcttaggtgctacttcgtcctatagcttgtttttgtagttttcttttaatattgggaactacctgtgtaataaacttctttttcagaatgagctgttcctccactgaattagggaataaggaggtgtactctattagtgcctctcttggcctttccataaaggctacagaattcttatctggcttttggttcattatagagagtttcgagtaactgagaggtttggccctggtttttcataggtctcttaaaatgcgtttaaaaattggtttctttttcattcatttcctgagctattggggttttagttagggttatttaccagaactgctttcctccctattgggaatgatttttttttttggtttggtgttttttttttaagtgataaaaatattttatttaaatggtacagaagaaattatgtgtacttaaaaatgattaaaaattcatgttaggaaatgctaaaaacccaataatttacacaatgataaaatctaaaatgatgagaaaacatgaaatgctttcgtttggtcctctgacctaacaaaactattaagaacatgagatatagtaattactgaagttgggttaaaagcacaagacaacataattcctttatatacatccagccattttatacaagaaactgttataccttaaatggaagagtgaagaatttgtttaaaatattgagagtgcattatgcacctataatgaaaccactttctccaaagattcaaacagattaacattgcaaaatggtatttctatataacaccaacttctgaaaaatttaataattcatttaagaatatgcaagtgaaatgtagtttattctgatttcaacaacggatattcaaagtcacaatttttcccaagaaatcattcactttatactttcaaaaacacattgtagcttttctgttaccagtcagccatgttttcaactagctgcatgtttaatcattcacttcaaatttacatgtccagcccagcacagtggcgtgggcctgtagtcccaactacttcagaggctgaggcaggaggatcgcttgatcccaggagttcaaagccagcccagtcaacatagcaagaccctgtgtcttcagaaatcatccaaggagtgagataaacattacaacccacatatactgggtaaacaacaagggaatgaaaaatgacctcacatgccctaaagcaatgttgacgcaaactcctgatgcaataagggcagcagttgtaatgggtacctggaatggtatcgtggaattggagaacttatttttgtaatgaaaggaaagctagcttgaaagaaatgtttttgaggttttctcttgtttttctcctttttgtttggttcaggtttgaaatttagattggcttgggttaaatttgggtaggcaaaaaaatattatctttaagggaattaatatttatcaaatattctcttttttcatgtaaaccccaatgaatgatatgaaatttgaagaaataggagagagcaagaaccatagaatgaagtcagaaaaaccctgctcttctttaaaatagagaggctaattttaaaatgttgagtttaggacctggaatgcgaaacatctcaaattagcactttgaacgctttctcctcccaagcccgtcgcattcctttctttatcttcatgttaaggctgggtggaaggttcatcaattcccggatatgatccaaaatagacttagatttgtacctatgagaatcaatgatcttagcagtacgtgacttatatccaattctcagaacttaatgcttaccattgtaacattatgataataaaacactggcagatataaagtcatgtcatttattttagtcatattgaatctcttagaataaattatttattttttagaaaatatcttttagagtaaaatttacataaatcaaatgtattcctgttataattttaaatgaacatccatctacccccaatgctttaagtattagagagtagacttgacgtccatctaagactcctttcagctttacataaggtctcattactatgatgcattggatcctcttgttctctgttttcttcaggaaatcatgctcacagaggttaggtaaattggtcagggtaacacagtaatggctgcactacatttaaactgcagctttttaaatccatgtttaatactttttctcaacacctcccaattgcctcacattatttcagattcttctttgggaccccttgaattcaccctatgtagcacctcccttggcaaaaaaaaaaaaaagttaacaaaatatgctttcttaataggcaaaaagggggatgtatatttcttcaaataactaaaaaaggggagtccatatttattaagtgaaaagaacaagtgcaatcacattagcttgaaagggaaataagtgattacatgatatacttggactgttggacaggaacagataggggacttttccgtgagttatttattttggtcttttatttaaagcagccctaatttttagattgtttgaataacagacaaattagaagctcagcaaatttcttagtggacaattttaactttccaaaaaatatccttgcatttccgctaccttctttaaaaatgaaacctatccctcttcaggacactggtcccaagacagatcatctagaagtacccaaatacctccaaacagatcaggaccaattcaactatttctagaaaaaaaaaaaaacaaagtctgtgcttcatattggatgcccacaatatgttctccctgctcttctagattacttattttccttttttttattattattatactttaagttctagggtacatgtgcacaacgagcaggtttgttacataggcatacatgtgccatgttggttgcctgcacccattaactcatcattttcattaggtgtttctcttaatgctatccctcccccatccctccaccccatgacaggccccagtatgtgatgttccccggcctgtgtccaagtgctctcattgttcaatttgcacctatgggcgagaatatgcggtgtctagttttctttccttgtgatagtttgctcagaatcatggtttccagcttcatccatctccctgcaaaagacatgaactcatcattttttagggctgcatagcattccatgatgtatatgttccacattttcttaatccagtctatcattgatggacatttgggttggttccaagtctttgctattgtgaatagtgctgcaataaacatacatgtgcatgtgtctttatagtagcatgattaataatcctttccgtatatacccactaataggatcgctgcgtcaaatggtatttctagttctagatccttgaggaatcgccacactgtcttccacaatggttgaactagtttccactcccaccaacagtgtaaaagtgttcctatttctccacatcgtctccagcatctgttgtttcctgactttttaatgattgccattctaactggtgtgagatggtatctcattgtggttttgatttgcattcctctgatgaccagtgatgatgagcattttttcatgtgtctgttggctgcataaatgtcttttctgagaagtgtctgttcatatccattgcccactttttgatggggttgtttgattttttcttgtaaatttgtttaagttatttgtagattctggatattagccctgtgtcacaagggtagattgcaaaaattttctcccattctgtaggttgcctgttcactctgatggtagtttcttttgttattcagaagctctttagtttaattagatccatttgtcaattatggcttttgttgccattgcttttagtgttttagtcatgaagtccttgcccatgcctatatcctaaaaggtattgcctaggtcttcctctatggttttagatctaacatttaagtctttaatccatcttgaattaagttttgtgtaaggtgtaaggaagggatccagtttcagctttctatatatgactagtcagttttcccagcaccatttattaaatagggaatcctttccccatttcttgtttttgtcaggtttgtcaaagatcagatggttgtagatgtgtggtgttatttctgaggcctctgttctgttccattggtctatctctctgttttggtaccagtaccatgctgttttggttactgtagccttgtagtatactttgaagtcaggtagcatgatgcctccagctttgttcctttggcttaggaatgacttggtaatgcgggctcttttttggttccatatgaactttaaagtagttttttccaattctgtgaagaaagtcattggtagcttgatggggatggcatttaatctataaattaccttgggcagtatggccattttcatatttattcttcctatccatgagcattgaatgttcttccatttgtttgtgtcctcttttatttcattgagcagtggtttgcagtgctcagtaagttggattcctaggtattttattctctttgtaacaattgtgaatgggagttcacacgtggcttggatctctgtttttctgttattggtgtatgggaatgcttgtgatttttgcacattgattttgtatcctgagactttgctgaagttgcttatcagcttaaggagattttgggctgagtcgatggggatttctaaataaacaatcatgtcatctgcaaacagggacaatttgacttcctcttttcctaacttaataccctttatttctttgtcttgcctgattgccctggccagaacttccaatactatgttgaataggagtggtgagagagggcctctctgtcttgtgccagttttcaaagggaatgcttccagtttttgcccattcagtatgatattggctgtgggtttgtcataaatagcttttattatttgagatacgttccatcaatacctagtttattgagagtttttagcaggaagcactgtggaattctgtcaaaggccttttctgcatctattgagataatcatgtgatttttgtcactggttctctttatgtgatggattacgtttattgatgtgcatatgttgaaccagccgggcatcctagggatgaagccaacttgatcttggtggataagcttcttgatgtgctgctggatttggtttgccagtattttattgaggatttttgcatcaatgctcatcagggatattggtctaaaattctctttttttgttgtgtctctgccaggctttggtatcaggatgatgctggcctcataaaatgagttagggaggattccctctttttctattgattggaatagtttcagaaggaatggtaccagctcctctttgtacctctggtagaattcggctgtgactccatctggtcctggactttttttggttggtaggctattaattattgcctcaatttcagagcctattattggtctatacagagattcaaattctttctggtttagtcttggaggggtgtaagtatccaggaatttatccatttcttctagattttctagtttctttgcatagaggtatttacagtattctctgatggtagtttgtatttctgtgggatcggtggtaatatcccctttatcattttttattgcatctattttgttcttctcccttttattctttattagtcctgctagcggtctatcaattatgttgatcttttcaaaaaaccagctcctggattcattgattttttgaagggctttttgtgtctctatctccttcaattctgctctgatcttagttatttcttgccttcttctagcttttgaatttgtttgctctttcttctccagttcttttaattttgatgatagggggtcgattttaggtctttccagctttctcctgtgggcgtctaatgctataaatttccctctaaacactgctttagctgtgtcccagagattctggtatgtggtgtgtttgttctcattggtttcaaagaatttatttatttctgccgaattttgttatttacccagtagtcatttagttttacattttgaaacacccaaacaactgtcactggattgcttgcaacagaaaggataaatgctttatgggatggatgctgcattctccatgatgtgattatttgcatgcttgtatcatatcttatgttcctcataaatgtatacacctactatgtacccacaaaaaataaaaataaatgacaggcaaacgaccaatatgcacatgaaaagatacccaacatcatgagtcgttagggaaatgaaagtcaaaagtatcatgagataccacttcacattcattaggacggctattacttaaaaaatgaaaactgacaggtgtgaggatgtggataaactgcaacccttgaacattgctgtttggagtgtaagatggtgtgattgctgtggaaaatattatggcagttcctcagaaaggttactcatcataatatacatctctttagcaactgggatacattttttctatcaatggtttaaattcactggcaataaaactgaagagaaaaatgaagtaagagggagaaagaaacaagggagaaaggaaattcgaattcacttgacctttaaattctaatatatgttttaaggctgcttcctttcatcatgaacagagaacttgagtcctccacaccagttgaagaaaactgcattgtgactgaagtccaatcacctgtacctcacacagtctggaaataaggaacacacaaatcaagaactagacaagaaattcaactttctccacaaatcttcttgggaaagagtgtctctgaaaattttgatacccttggacactcagaaaagaaaagggtggagttagagcccagctgtgtgagaggcagatgggaactggcctcacctggcaaagccaagggaaccagtgtgagaccaggggggacacaagggctttctctacctccttccataggtcctgtttaggatcaagaccattgttctcccagaacctctataggcaaaaagaaggattaccttccgttgccaataatttccaccagaatcctcactatttttaccattgtacaaattaggaaaatgcacacattcttggtagattctgcacagtggagagaaagcttaaagagaggcatggaggctggactttacaacccctcaacctcactccatcatccttatctgtgcatttccctggtgacctctttttcctcctggtgcctcccccactgtcatttctgctgcatcacagacacagacttgcaagcaagtgtggttgtgactgagtctatttctgacaccttaccctttctcaccctgtggggaattcttgctgagagggctttggaatcaggaatgaagccagagggcagggctgacagggaccatttaaatgctgcaactcctagagattcacatggaagcctggacacaattcagaagagccaacccaaggaagcaaaaatgtcaccactacctgtgagttaaaaaggcacagccttcaataatctcaagtcacattaaagaaggtggaaaaagggagattttatgagaggaaaatatgagagtttctattgtgaatgttttactgagattggaggtgtgtggaagacagagaccctgggactatgatgtctgagatgtttgtggggtgtcaggtgtggcccatggaccagtgtaaccctctgtgagggtgtgatagtgtctgatgagagtcaactctgctgagatgatgttacgttaggtaaaaggtgtaaagcccaccaggatgggtgggacgtgcctgagtgtaagagggtgactgtgttttgtcttcctgtctgtgatgtgagtgtgtgtgagcacacccagaccaatgcatgagcatctttatatggacagtgagcaggcatgtgtgactcagtgagtggtgtggctctgtgtgactgtggtagtgtgtgtgatgggatgtgactaggtgttgaactgggaacatgcacgtggccttctgtccatgtgaagtttcctccttacacagcagggcctctgatgaagcagctgtgcatcttcccatgtgtgtcagtgtggatcccgggtggcagaactggtggggatcttggggactgggagttaccaatgactcatttgtgagcattaatgagagcagaatgtatgatctgtagatgtctcttcccaggcagagtggaaaagaggaatccagactatgggaacaatggtccctcaggtggggtctgcacatagtgaccatgatctcctgcctctcatcctcaggtcttttcctgtctcccacccaaggctgccattcccattgtaggtcaggagggtgtgcaagtcctggctctctgaggaagaacattggagactgtggttttagagactgaatcacctcaaactggaaaggaacaagggtagcctcagttcagatagagtttacagtggatattaatcatccaagtagctgggtttgctggctcatgtctataatcttaccattttgataggcaaaaatgggaaaataacttgaggccaggagtataagagcagcctgggcaaaatagtgagacaccgtctttacaaaaactttaagtgtcagacaggcaacttggtgggcattttttttttgagacggagtcactctgtcacctaggctggattgcaatggtgcaatcttttcttactgcaaccttcgcctcccgagttcaagtgattctcctgcctcagcctcctgagtacctgggattacaggtgcacaccaccacgcttggctaatttttgtatttttagtagagacgggatttcaccatgttggtcaggctggtctcgaactcctgacctcgtgatcgaccttccttggcctcccaaagtgctgggattacaggcatgagccactgcacccagccttggcgggcatctttcaccaaagctactcaggaagccaaggtgtgaggacccctgcagcacaggagttcaaggcttcagtgagctatgggtgcaccactacacatcagcctgggtgagagagtgagaccatgtctcagaaaggaagaaaaattatccacttgtaggttgtctctaattacttccctgacccgcactcttcatttgtccaagtgctgcagctgtgctctcaacaatttttacaacttctgggaaagatgcccatggcccttgacgatagtgatgcatgtgcatcccacacacaggggtttcctgttcttttgttatttccctctctctttcaacaagtgttgcttcttacggattgaatttctccactgatagatcctcaagtcttgttttcacagatattaatttctctatcactaagatcacccattagtaagaattactaataaagataaaaaataaaaagtaaagaaagtacagaaaaaaagaattttaaataatcttcctagtacctgggaaacagttaggcagagttcaggtatggatctaagatggcactgtcagtaagaggcagaatcaggactggagtccaggcagcctggctcctgaatcctagctcctaactatgagaccctcatgtctttaggaatatggagttctgactgtgatagggtgaaagagggaagtcctcacagtttgcctgttgatctctaattttctacatcatggtaatctgtcacaaaaggggaggccacacctggcccagcccctttcacccactctcaatcccctagcaggtgccacacagaaggcgtgtcctcgtccattggttcttgcatgacaatcagagggacacggatcctccctttcatgtgagtactgcatggcacaggggtggaaaagaagggagaatatttactcaggaggtggtctcatgtgagtgatgtggaaatttctagttggcaggatggaggaaccatgcaggcgcaggtcctggagaccctccagcaccaagcatgaaacctgcagtggctgaactgtgggccagtcatgaggtctaagggaggagaacactcaggggttagggctgtggctctttatcaaggggcacagaattttcagggaatggacaaggcatagacccaggtaagtgactgtggctcactttccatcttgtgaggggaagagaatctccccacctgggggatatacgaggagctaaagcagccccacagggaccaggcctgcagtatcaccagagagatcagggaggcttctttatgccttggggaaaagaaggaagggatttgtgtgtgtgttgagtgtgtgtcctacaagggaggggcctgcccaacactccgtgtgctttgccctcagcaatgacccagagctgcgggtggaattctacactgggatgaatgagaactcagacatcgccttccatttctgagtgcactttggccattgtttggtcattgacagccatgtgtgtggggcctggaagtgtgaggggagatgccacaatgtgttcttcaaggacggcaaacaatttgatctgagcatcttggtgctagacaatgaataccaggtgagtgccctaggagctcccggtatccagcctccatgggttctcagagcaggaggcagctctccctggcctgacccaaatagattttcaggacccatttctcataactactcttaccccaggctttttatcacagagcaccctctggttgcaccgctatcctcagctcgtttccaaaatctgaccgtgatcagtatcagctcatctggcatttcccccaaggtgaagaatctcctgtcttttctcactgtattcatttctacttatgttgctgtttaaattttcactttgctgaatgaatacaatattcataagaataaaattgttttagtcaatgaaaaattaaggctttgtctcactcctggacccaatcttattcctgagagcattaccagcgctctgctctccttccacaggaaatctttgcttatagaagcatatagatctacaatttcatttgtttttaagaaaatcctagtatacattgctccacacgttacaccttaaaaactgagttgatttgttgtgaaagaatatatcttgaagataccgtctattaatggtgcttcctcagtttttaaagaatgcataatattgcattataaggattacctaaaattattaatcttgactctttttaagggccttgaggttatttccaatattttgctctcactaatggtgctgtattaagacttctagtcaattcttttgttttatccacctcccttacttatattgaaagataatcataaagaaatgaaaaactggttcaaaaatgtgtgcattttaaatttaacaaattgacacctagaaggttactttatagactcagtaatgaagaatatatccaaatgttctggccctttcttatgagtagagcaaaagattcacattttattcagattcaagtgaaggatctctttctatgcttagaaaccgttcaaaatgatagcctatgttttgcaacacttgtccaattctacctctccaacaacacttgaattttattcttggccaccatcagcccagatctaggcaactccaaagagaaactgggccatcagtagggaatggcagtcagagttcatggaacagatatatatgcattcaatgaacataatccagtgttaatcctgtttgaacccctgtacaagatgcagggattcaagttcatgaaatacagtcactagccatggggattttccaagctagacgggaggctgagcaaacatagaccatgtgacacagagtggtacagccttgctggaggaaacagaggaaacactagaaataatgtgagcactctctcaaatagttaatctttaacaggattgtgagtcttgggttcagttatataactagcagttttctcaggggatgttgtaggtataggagagagtagagagaaggctgaaagtttgtttggtggcatactgtctttctgaggcacttttcctcttgtaggtaataataaatggccaacaccatacatctttgcccatccacttccaccatgttctatgaagattttgcaagtgtgggaagatgtctccctgacctcaatgtctgtctgcaatttatggagatgaccacacccctcattgttgaggaatccctctttccatgtgaccataggatccccagagcctgctaacagcatgatctctcctcacccttttccctacacttggtcattaaaacatcaccaaacttcccagaatttggttcttgctttaagggggaaagagaaagtggtaatccccaagaggccccgaggaactttatgggaagcatccagaaatcaaataggataaaccttcttgtgactccaggagtgaatgacaaggtccctgcaatatcttaggagacattaggtacagcatcctttgacagcatattgttgacatcagagactctgagacaaaatctttaccctatcttagatgactcactgcactgaaatgttaggtagatgtttacagccacacagatgtacctcgtggctttggggagaaattttgtaacttaagaacaatctagtggaatttcctaatactttccattattttcaggatatttattgtatgttaacacggtgcctggctctgtataggctgccatacaggagctttacaaaaagacacgtttctcacttgaaaatttcaatccaagcaacagttagagaatcacaggagtccaaagatttctcttaaagaaccccaattgtggaagatagtgtggcaattcctcacggatctagaactagaaataccatttgacccagcaatcccattactgggcatatacccaaaggattataaatcattctgcgataaagacacatgcacacatgtgtttcttgcggcactattcacaatagcaaagacttggaaccaacccaaaagtccatcaatgatagactggattatgaaaatgtggtacatacacaccatggaatactatgcagccataaaaaggatgagtttatgtcctttgcagggacatggatgaagctggaaaccatcattctcagcaaactatcagaagatcagaaaacaaaacaccacatgttctcactcataagtgggagctgaacaatgagaacacatggacacagggaggggaacgtcgcacactggggcctgtttgggggtagggggctaggggagggataacattaggagaaatccctaatgtaggtgacaggttgatgggtgcagcaaaccaccatggcacatgtatatctatgtaacaaaactgcacgttctgcacatgtaacccagaactaaagtataatttttcttaaaactaaaaaataataataataattgtgagatttttccaaagtatgtggcagaatcctgggatttctatttaaaaacaagtggtcatggttttagatcagaaaatatgtagtttatttttgggatggacacaattcatacacatggacacagtgagctgaccttgctttgctgctctttcattaggcattgcagcacagcaaagctcccaacacacgttggcttacagaaatcatttactctgatctttcttggttaactggactcatgtgggtagtagatcatgtggtgagagtcatgttttctgaagcgtcttttagtttgggattccagaagatgcttcactcatgtctgactcaacacgagggctgggtgagcacctacgggctggctgattatctccttccctacgtcacttccctattcatgccttgaattccctcaaatcataagagtctcatggttcttggacttaaggaatgatgattggctgccaccaaagaaagccttccaaaaggctcaaggagaaggtgaaaggcatcataggacctggctttgaaaggcagacagtgtcacttctatgacattatattgatcaaagtgagccatacacaagcccaaatcaaagggaggggggtttcataagatgtggttattttgacatgcagtcatgagggagcatccttggcaactatttccactcagtcctcactggcttacatttttcccatatatcaaaagcactaatcctgtaaggaaccactgaaggcaatacacttataggaacaggctcagattgtagtccagaatgttatcatccaatcaggatctggtgtccatgaagtgactagaaattatcatgtgcactttctttcaacatctgcactaaagaaatacattatctgccctatacatattaaacctacaagactaaaacagatataggaaaatgcagtgaacacacttattttagagggacaaaagataataaacagcaccctgaaagcaagatgggtcaccaacaactctactggagccacccacaaaaaaatcagccagggttctcacccttgttgcatctgctcaaaccagcatctccttatctgaaaatattgtcttgatatgtgccgcttctgtttccacaagtacttaaaggatataggtctcattaagttggactaagtgatgctccttgaattaataagcaagacatccactcagtgaaagaaaccatgctaactctttgtacatgaataaaaattaaaataaagaaaccaatacaaacaaacaagaacaaaaaaaaaataggcatccatcactggtccacatcttgctgaagccaactatacccgtattttcatcttctctgaaaacgtttctctgcaacagttggctccaccttctactgtcagcttcttagagctcctaccaagtaggcacaatgacagcccttttccctctataagagctgttgtcatctggttcatagcacaaatagagaaccatttaggagaagataaacaacatattacctaaaagccaaacaatgcagactgaagagggtctcatcaaatagcctctttgtctgcagggcctatcacaggtgtcaatttgatcatcttcatcctctctttccatgttcattgccacaacttgttcagctccaaccttactcatgggtatgcctctctccttgccctcctttaacctaatattcatataccttgaggtgtcaatgcacagtaaatgacaccttcatgcctctctttcttgttgctttcctgtatgaactgaaattccctccgctgtcactggaaagtctcaggttcttgttaggtacactttcccccttatatcatccctctcacagttttggtcaccgccctattttgatgatggatcataggccccctcatcagcatggaaatcatttcttggggaattaggcaatacttgctctgagtggataaaaactatcttggaccccatgagtttctgagcagaacatgagattgatttcatatctacatgtcgctggacgatgcccattgtatttgcatgacctacagtgtcctacatgctgcccctgctatacaaacacacagtgactgccttttcttgactgatattcaccagttcagttcagctcatataggccatttgttactctcatctttataccaactactaccctatgctcatggtggccaggagtgatgtctcagataaaaagagaagacatagagccaaggaaccaatgttgaacaaacgatttttgtttgcctctggagacttactcaacatctctttcatgcttgtcaacccaagttcatggccttctcccagcaaatacatcattgctgaaaacacagtaggttatttccgcagtctaaagccttaccttttgaaaggtctgtagggctttccagtttttgctgaaagcccccaaagaataaatctactctttgctaacgttgtccttgatgtccaagtctcccaaagctgtttcttctgtggtgctgtccgtggtgctgagctctggtgcgtctgggcctgtatttgcaagtgaggggccaataagacagaattaacagagaaattttttgttttgtatttgataaatcacagctcaaaatatgtatgatgaacggagcaggaattgaatttggactttcagatcacaatttctgcagtgccctctctcaccgtcctattcaacatagtgttggaagtcctggccagagcaatcaggcaagagaaagaaagaaagggcatccaaacagaaagagaggtcaaaccatccctgtttgcagatgtcatgattctgtatctagaaaacatcatagtctctgcccaaataattcttaagctggtaaacaacttgagcaaaatttcaggatacaaaatcaaagtgcaaaaattactagaactcctatataccaacaacagcaaagcatagggccaaatcaggactgcaattccattcacaattgccataaaaagaataaaatacctaggaatacagctaaccaggaggtgtaagatttttaccatgaaaattacaaaacactgcttaaaatatcagagatgacccaaacaaatggaaaaacatcccaggctcatagatagcaagagtcattatcattaaaacagccatattgcccaaagaaatgtacagattcaatgctatttctgttgaactacctatgacatccttcatagaattagaaaaaaactattttaaaatactcatggaaccaagaacgagttgaataaccaagacagttcttagcaaaaagaatcaagctggaaacatcatattacccaatgtcaaactgtgttacagggccacagtaacaaaacagtatggtactggtacaaaaacagacacagagaccagtgggacagaagagagagcccagaaataaggtcacacacctacaaccatcatcagacccttccactaagctgaccaaacaagcaatgtaaaaaggatttcttattcaagaaatggttctgggtaactggctaaccatatgcagatgattgaaactgaaccccttcatcacattatatagaaaaatcaacacaagatgggttaaagacttaaatgtaaatgcaaaactataaaaaccttggaagactacataggcaataccattctgaatgtagaaatggacaaaagttttatgacaaagatgcgaaaagcaacctcaagaaaagcaaaaattgacagtggatttatttaagctaaagagcttctgcacagcaacagaaactatcaacagagtcaacagacaatctacagaatgggagaaaatatttgaaaattatgtatctgaaaaaggtcttatatctagcatctataaggaacttcagtaactttgcaagaaaagaacaaacaactccattaaaaagtgggcaaaggggcaggacgcggtggctcacgccataatcccagcactttggaaggctcaggagggccgatcacgaggtcagaaaataacttgagaccagtctgcccaacatggtggtctcagacacctagaccaatggaacagaatggagaacccagaaatgaggccacacaccgacaaccatctgatcttcaacaaagctgaccaaacaagcaacggaaaaaagactccctactcaagaaattgtgctgggagaactggctagccatatgcaaaagattgaaactgaagcccttccttaaaccatatacaaaaatcaattcaagatggattaaagacttaaatgtaaaatccaaaactacaaacaccctggaagacaacctaggcaataccatgcaggacataggcatgagcaaaggtttcatgatgaagatttcaaaggcaatcacaacaaaagcaaaaattgtcaaactgaatctaattaaactaaagtgcttctgcacagcaaaagaaactatcaagagagtaaacagacagcctatagaatgggagaatatattttcaaactatttatctgaagaagatctaatatccgagtatctacaagaaacttcaacaactttacaagaaagaaaaaacaaacccataaaaaagtgggtaaagggcttggcacagtggcttatgcctgtaattccagcacgttggacagccaaggctggtggatggcttgagcccaggaatttgagaacaggctgggtaacgtggcaaaaacccatctctactaaaattagaaaaaattagcctggcatggtgacatgagcctgtattcccaactactcaggaggctgagctgggaggatcacctgagcccagaagccagaggttgcagtgagctgagacagtgccacaccactccagcctttttgtcagagtgagacctgttttaaaacaatgaaaaaaggtgagcataggacaggaacagacacttttcaaaagtagacatacaggtggccaacaagcatataataaaagcttgacatcactgaacattagagaaaagcaaaccaaaaccaaaatgagataccatcccacaccagtcagaatggctcttattaaagtcaaaaaaggacagatgctgacaaggttatgaagataagggagcacttacacattgttggtggaagtgtaaattagttcacacattgtggaaagcagcgtggtgattcatcaaacagctaacaacagaactacccttcaacccagcaatcccatcactgggtgtatacccagaagaatagaaatcattctgccataaagacatatgcacatgaatgttcattgcaaaactatgcacaatagcaaagacatggaatgaacccaaatgcccatcaaggacagattaaatacagaaaatgtggtacatgtacacaatggaatactatgcagtcctataaaacagtgagattatgtcttttgccataacatggatggagctagaagccattattctcagcagactaatgcaggaacagaaaaccaaatactgcatgttctcacttataagtgtgaactaaatgatgagactcatggaaccaagaggggaacaacacacactggggcctacttgagggttgagggtgagaggtgcaataggagcaaaaaaataactattgggtattatgcttagtacccagatgaagaaatcataattaccacaaaacccatgacacaattttatctgcatgtgtaccactgaacctaaaataaaaggaaaaataaatcaaagaaaaaaacaaatctcaattctgttccaagatggctgaataggaacagctctggtctgcagctcccagtgtgatcaacgcagaagacagtgatttctacatttccaactgaggtacctggttcatctcattgggactggttggacagtgggtgcaggccaaggagggcgagctgaagacctgggaagtgcaaggggtcgggagattaccctttcctagcaaaggcaaaccatgacagactgtacctggaaaatttggacacaaccaaccaaatagtgtgcttttccagtggtcttagcaaatggcaccccaggagattacatcttgcacctggcttggcaggtcccatgcccacgaagctttgctcactgctagcgcagcagtctgagattgacctgggaggcagcagcctggcaggggaggggtgtccgccattgctgaggcttgagtaggtaaacaaagtggccagggaagctcaaactgggtggagcccaccacagctctgcaaggcctgctgcctctgtagactccatctctgggggcagggcatagctgaacacaaggcagcagaaacttctgcagacttaatcatccctgtctgacagctgtgaagagagcagtggctctcccaacgtggtgtttgaggtctgagaatggacagactacctcctcaagtgggtccctgacccccgtttagcctaactaggagacacctcccagtaggggccgactgacacctcatacaggtgggtgccccttgggacaaagcttccaaaggaaggatcaggcagcaatatttgctattttgcaatatttgctgttctgcagcctccactggtgatacccaggcaaataagagtggacctccagcaaactccaacagatctgccgctgagggacctgactgttagaaggaaaactaacaaacagaaaggaatagcatcaacatcaacaaaaaggaaatcctcaccaaaaccccatctgtaggtcaccagcatcaaagaccaaaggtagataaaaccacaaagatggggagaagccagagcagaaaagctgaaaattctaaaaaccagagtgcatcttctcctccaaaggatcacagctccttgccagcaccggaacaaagctagatggagaatgactttcatgagctgacagagctaggcttcagaaggtcagtaataacaaacttctccgagctaaaagaggatatttgaacccattgcaaggaagctaaaaatcttgaaaaaagattagatgaatggctagctagaataaacagtgtacagaagaccttaaatgacctgatggagctgaaaaccatgacacgagaaatacgtgatgcatgcacaagcttcaatagccaattcgaccaagcggaagaaagggtatcagtgatcgaagatcaaattagtgaaataaagcaggaagtgaagtttagagaaaaaagagtaaaaagaaatgaacaaagcctccaagaaatatgggactatgtgaaaagaccaaatctacgtttgattggtgtacctgaaagtggcggggagaatggaaccaagttggaaaacactctgcaggatattatccaggagaacttccccaacctagcaaggcaagccaacattcaaattcaggaaatacagagaacaccacaaagatactcctcgagaagagcaaccccaagacacataattgccagattcaccaaggttgaaatgaaggaaaaaatgttcagggcagccagagagaaaggtcaggttacccacaaagggaagcccatcagactaacagcggatctcttggcagaaaccctacaagctagaagagagtgggggccaatattcaacattcttaaagaaaagaattttcaacccagaatttcatatccagccaaactaagcttcataagtgaaggagaaataaaatcctttacagacaagcaaatgctgagagattttgtcaccaccaagcctgccttacaagagctcctgaaggaagcactaaacatggaaagaaacaactggtaacagccactgcaaaaacatgccaaattgtaaagacaatcaatgctaggaagaaactgcatcaactaacaggcaaaataatcagctaacatcataatgacaggatcaaattcacacataacaatattaaccttaaatgtaaatgagctaaatgctccaattaaaagacacagactggcaaattggataaaaagtcaagacccatgagtgtgctgtattcaggcaacccatctcacgttcagagacacacataggctcaaaataaagggatggaggaagatctaccaagcaaatggaacacagaaaaaaaagcaggggtggcaatcctagtatctgataaaacagactttaaatgaacaaatatcaaaagagacaaagaaggccattacacactggtaaagggatcaattcaacaagaagagctaactatcctaaatatatatgcacgcaatacaggagcacccagattcataaagcaagtccttagagacctacaaagagacttagactcccacaccaaaataatgggagactttaacaccccactgtcaatattagacaggtcactgagacagaaggttaacaaggatatccaggacttgaactcagctctggaccaagcagacttaatagacatctacagaactctccaccccaaatcaacagaatatacatttctcagcatcacatcgctcttattccaaaattgaccacatagttggaagtaaagcactactcagcaaatgtaaaagaacagaaatcacaacaaactgtctctcagaccacagtgcaatcaaattagaactcaggattaagaaactcactcaaaaccgcacaactacatggaaactgaacaacctgctcctgaatgactactgggtacataacgaaatgaaggcagaaataaagatgttctttgaaaccaatgagaacaaagacacaacataccagaatctctgggacacatttaaagcagtgtgtagagggaaatttataccactaaatgcccacgaaatttctttgtggaaagatctaaaattgacatcctaacatcacaattaaaagaactagagaaggaagagcaaacaaattcaaaagctagcagaagataagaaataactaagatcagggcagaactgaaggagatagagacacataaagaaccaacaaaaaatcaatgaatccaggagcttgttttttgaaaaagatcaacaaaattgatagaccgctagccagactaaaaaagaagagagaagaatcaaatagatgcaataaaaaatgataaagaggatatcaccaccgatcccacagaaatacaaactaccatcagagaatactataaacacctctacgcaaataacctagaaaatctagaagaaatggataaattcctggatacatacaccctcccaagactaaaccaggaagttgaatctctgaatagacaagtaacaggctctgaaattgaggcaatgattaatagcctagcaacaaaaacaagtccaggaccagatggattcacagctgaattctaccagaggtaaaaagaggagctggtaccattccttctgaaactattccaatcaatagaaaaagagggaatcctccctaactcgttttatgaggccagcatcatccaaataccaaagcctggcagagacacaacaaaaaaagagaattttagagcaatatccctgatgaacattgatgcaaaaatcctcaataaaatattggcaaaccaaatctggcagcacatcaaaaatcttatccaccacgatgaagtcagcttcatacatggggtgcaagtcttgttcaacatactcaaatcaataaacaaaatccatcacataaacagaaccagtgacaaaaactacatgattatctcaatagatgcagaaaaggcctttgacaaaattcaacagcccttcatgctgaaaactctcaataaactaggtattgatggaatgtatctcaaaataatgagagctatttatgacaaaccgacagccaatatcatactgaattggcaaaagctgaaagtattccctttgaaaactgacacaagacagggatgccctctctcaccactcctattcaacatggtgttggaagttctggccagggcaatcaggcaagagaaagcaataaagggtattcaattaggaaaagaggaagtcaaattgtccctgtttgcagatgacatgattgtatacttagaaaaccccatcatctcagcccaaaatctccgtaagctgatgtgacttcagcaaagtctcaggatacaaaatcaatgtgcaaaagtcacaagcattcccatacaccaataacagacaaacagagagccaaatcatgagcgaactcccattcacaattgcttcaaagagaataaaaaacctaggaatcaaacttacaagggatgtgagggaccctttcaaggagaactacaaaccattgctcaatgaaataaaagaggatacaaacaaatggaagaacattccatgatcacggataggaagaatcaatatcgtgaaaatggccatacttcccaaggtaatttatagattcaacgccattcccaacaagctaccaatgaccttcttcacagaattggatgctacctgacttcaaagtacaccacaaggctacagtaaccaaaacagcatgatactggtaccaaaacagatatatagaccaatggaacagaatggagccctcagaaataacaccacacatctataaccatctgatctttgataaacctgacaaaaacaagaaatgaggaaaggattccctatttaataaatggtgctgggaaaactggctagccatatgtagaaagctgaaattggaccccttccttacaccttatacaaaaattaattcaagatggattaaagacttaaatgttagacctaaaaccatgaaaaccctagaagaaaacctaggcaatatcatttaggatgtaggcataggcaaggacttcatgactaaaacaccaaaagcaatggcaacaaaagccaaaattgacaaatggatctaattaaactaaagagcttctgcacagcaaaagaaactaccgtcagagtgaataggcaacctacagtatgggagaaaatttttgcaatctacccatttgacaaagggctaatatccagaatctacaaagaacttaaacaaatttacaagaaaaaaacaaacaaccccatcaaaaagtgggcaaaggatatgaacagacacttctcaaaagaagacatttatgcagccaacaaacacaggaaaaaatgcttatcatcactggtcattagagaaatgcaaatcaaaactacattgagataccatctcacaccagttagaatggcgatcattaaaaagtcaggaaacaacagatgctggggaggatatggagaaataggaacgcttttacactgttggtgggagtgtaaacgagctcaaccattatggaagacagtgtggccattcctccaggatctagaactagaaatatcatttgacccagcatcccattactgggtatatacccaaaggattataaatcatgctactataaagacacatgcacacgtatgtttattgcagcactgttcacaatagcaaagacttggaaccaaaccaaatccttcaatgatagactgaattaagaaaatgtggcacatatacaccatggaattctatgcagccataaaaaaggatgagttcatgtcctttgcagggagatggatgaagctggaaaccatcattctgaacaaactatcactagcacagaaaaccaaataccgcatgttctcactcataggtgggaattgtacaatgagagcacttggacacatggcagggaacatcacacatgggggactatcatggggtggggggcagggggatggatagcatcaggataaataatgtaaatgacgagttaatgggtgcagcaaacaaacatggcacatgtatacctgtgtaacaaacctgcacattgtgcacatgtaccctggaacttaaagtataataataattttttttaaatctcacctttctcccagaatctgcagaagaaacagtctccctcaaactttgatttacatggacaccaacagagggtgtagctagagcccaagtgtgtgacagtcagatgaaagtggcccttacctagcaaagccaagtggcttagtgtggggcaggttcatgcaagaaatttctctacttctctctgcagatcctcctcaggatcaaggtcagtgctctcccagaacatttaaaggcagagagaagaattaccttttagggctaacttgtttcccccaaaatctccaactttttttttcttgtttagccattgtacaaaattgggaaaatgtacaccttctgggtagattctgcatagtggagaaaaggcttgagaggcacaaaggctgggctttacaatcactacccctcactccatcatccttatctatgcatttccctggtaacccaatccacagtctggtaccttccccaatgtcatttctgctgcattacagacacagacttgcaaatagttatggttgtgactgagtttcttcgtgacacctgaccctttctcatgctgcaaggaaagcttgctgggaggagcatggaatctggaatgatgccagagggcaaagctgaaaggggtcatttaagtgctgcaactcagagattcactcagaagactggacacaattccgaaggtcgcccagaaggagaggacaatgtcatttctaactgtgagttgaaaaggcacagccttcaataatctcaagtcacacaaaaccaagaaagatgtggggtattttatgagatgaaaatatgagcattcctactgtgaatgctttactgagagttgtgggtgtgtggaagagaaacactgaggctgggtatctgagatgcttgtagcatgtgggttgtggatcctggacaaatgtaaccctctgtgagcatgaggtggtatctgatgagagtgaactctgatgagatgatgtgactttaggtgggaggtggatggcacaccaggtcaagcaggtgtttgtgtgagtgtaaggggggtgattgtactttgtcttcctctttgtgatgtgagtgtgtgttagcacagccagaccagtgcatggtcatctttatgtgcgcagtgagcaggtgtgtgtaactcagtgagtggcatggctctgtgtgactgtgggtgtgtgtgctgggatgtgactgagtattgaagggaaaacacgcatgtggccttctgtgcatgtgaaggttcctccccacacaacagcacttctgatgaaggaactgtgtgtcttttcatgtgtggcaatgtggatcccaggtggcttaactggtagggatcttggagattgtgagttaccaaggacttgtttcagatcacttatgagagcagaatgtatgatcagtagatgtctcttcccagtaagagtggggaagaggaatggagactatgggggtgatggatcctcaggtggggtctgcacagagtgaccactgtctcttgcctcccaggctcagcttccctgtccccagcctatcctgtccttttcattgtgggacaggaggtttgctagagaaggatattagaggccatggtttcagagactgaatcacgtaaaatatccactgtaagctatgtctcaactgagtctaaacttgttcctccacccatgaaggaacaagtctagtctcagttcagacagagcttacagtggatattaatcaacaaagcagctgggttcactggctcacggctataatcccaccaatctgagagacaaagatgagaggataacttgaggccagaagtttgaggccagtctgggtatcatagtgagaccctttctttaaaaaactttaaatatcagactgccagagtggcaggcaccttttgccccagctacacaagagggggcagatgtgtgaggatcactgcagcccaggagttcaacgtttcaatgagctatgatcgcaccactgcatgtcagcctgggcaacagagcaagaccctatctcaaaaatacagaaaaatcatcaaccacttgtagtcattgtagaaatcaatcattccctccagttatgtccctgacccacaggcttcacttgtgcaagtactggggctgtgctgtcagtaatgtgtgccacttcttggaaggacgtccattgcccttgatgattgtgagagttgaaaataaggcagatcagtgtttcaggaggactcccctgttctgttaggtcacccctaacaggccctacacatgccagggattagggtaaaagttttacatgtattaactgctctattatggagaacttcctacacagtaggaattcatgataatcctccttgttttagggaaactgaggaagtcaagtaaccgatctaagattgcactgctagtaagaggcagaatgaggactggaatccaggcttcttggctcctgaacccttgctcttacctatgggtccaccataccttcaggaatgtggggccctgactgtggtagagtgaatggggagagtccacagagcctgccctgtgatctctaacctcctgcaccatgggaatatgttacaggaagggagactgcacctgaccctgcacctctcacttattctcaataccctggcaggtgccatacaaactgcctgtgtctttgtctgttggttcctgcgtgataatcaaagggacactgatcgactcttctatgtgagtactccatggtccaatggagggggtggaggagaaaggagaatatttgctaagagtttgaccttatgtgtgggtgatgtggaaatgtctaattggcaggatggaggccccatgcaggtgcaggtcctggagaccctccagcaccaggcatgagacctgcagcaactgcatgtgggccagccatggggcctaggggaggagaatactcagtgggttgggactgtggctctttatcaaggggcatagaattttcagggaatgaacaagtcacaggcccaggtcagtgactgtgattcagttttcatctggggatgaggggcacagcatctccctgcagggggcacgaggagctgaagcatccccacagggaccaggcctgcagtatcatcagagagaattttaccctgggtaaatgggggaagggatttgtgtgcgtgtcaagtgtgtgtctgtgcaatgaaggaacctgtccaatatgctgtgtgctttgccctcagcaacgaaccacagctgcaggtggatttctacactgagatgaatgaggactcagaaattgccttccatttgcgagtgcacttaggccgtcgtgtggtcatgaacagtcgtgagtttgggatatggatgttggaggagaatttacactatgtgccctttgaggatggcaaaccatttgacttgcgcatctacgtgtgtcacaatgagtatgaggtgagcaccccaggagctcgcagtacccaggctctttgggatcccagagcaggagtcagctctcattgacctggcctcaccagtccctcagggcccatctcccgtaactacccctgccccaggttttcatcacagagcaccctctgcttgcactgccgtcctcagctctttcccaaatctgaccaaggtcaaggtcggctcatcttccatttcccccaaagtggagaatctcctctgtcttttcacatagtgctcatttctacttatgccattatttaaattttcatgtagctgaatgaatacaatatacttaagaagaaagttttttctatcaatcaaaaattatgtcttcgtctcacttttgggccccaattctactcatacgaataacattaccagagctctgctctccttcagagagaatcctttttctttttttttttttttgagacagagactcactttgtcatccaggttggagggcagtgacgtgatctcagctcactgcaacctccacctcccagattcaagcgattctcttgccttagcctcccaagtagatgggattacaggctgatttttttatttttagtagagacggggtttcaccatgttggccaggctggtcttgaactcccagcctcaagttatcaacccaattcagccttccaatatagtggattacacgcatatgccaccgtgccaaccccttcagaggaaatctttgcctatggaagcatatagatatgtctatgatttcatttgtttttaagtaaatcctggtatgttgctctacacattatgctttaggaactaagttggtttttcatcaaagaatatatcttgaagacattatcaatccatgtttctgcttcaattgtttatttgggcattgaagttgtttccagtattttgctctcacaaatgatgctgtattaagctttcaaataaatccttttgtcattaccaacctcccaatacttacattgcgatataattacaaaaaatgaaaaaactggttgaaaaatatgtgcattttaaatttgaaaaattaatactaataaggtgactctctatacagcctcaatataaggaatacatccatactttcttactttctctaacgagtaggccaaaagattcacatcttattcagattcaagtgagggatcttttcctatgcttagaagttgtcgaagataatatcctatgttatacaagacctgtcctcctttaactctctaagaacactgggtttcattctttgccattaacacctcagatgtaggctactccaaagaggaactgtgccatcagtagtgaaagacagtcacagttcatggaactgaaaagtatgcatttcagtgaacatggtctcgcactaaccctgtggcaggtcctgtgcgagatgcagggtctcaagttcctgagacacagttgctggtaatggggttgtccaggttagaagggaggctgaataaacagggactgtgtgacacagagtgtagaacttcactagataagaggaaacattagaaataaggtcagcaactgtctcaaataggcacaaaatgtcatctgtaaacagaagtgtatctacaacattcgcttgtataactaggagttttcttggggaatgttattggtactagggcagagtagagaagaggctgaaaacttgttgggtggcatactgtctttctgatgcatttttcctcttaaaggtaaaggtaaatggtgaatacatttatgcctttgtccatcgaatcccgccatcatatgtgaagatgattcaagtgtggagagatgtctccctggactcagtgcttgtcaacaatggacggagatgatcacactcctcattgttgaggaaaccctctttctacctgaccatgggattcctagagcctgctaacagaataatccctcctcaaccccttcccctacacttggtcattaaaacagcaccaaaccgtacatgatttggttcttgctttaagagggggaaagaggacgtgatcatccccaaaaggggccagggcattctatgggaggcatcaagaaatcaaaggggataaaccttcctgtgacaaagggagtgagtgacaaggtccatggaatgtctgataagacattaggaacagcatccttctatagtacgtagttgacgtcagacagtctgaaccaaaatacttacccaatctcagatgactcacggcacttaaatgttagatagctacttacagccacacaggtgtacctagtagctttggggaaaacctataactttaggaaaattatgtggaatttcttaatttttccattgttctcaggatgcttattgtgtaggaacactatgcctggctttgtgcaggctgctgtgaaggaagtgaagaaaaggatgacaagttttgcatgtaaagttttcaatccaagcaatagagaatcactggagcccagtgattccccttaaagaataccaattattcttattttcaaatatttgaaaagtttttcattttatgtggggagaatccaggggtttctctttagaaataaatggtcatggttttagatcagagaacacgtagattattattggaatagacacaattcatgtccatggacacagtgagcagatcctgctttgctgctattcttgcgataaattgcagcatagaaaactgcccaacacatattggctaaaagcaatcatttattttgatctctcccagctttacaggtttactgaattcatgtgagtggtaggtcatgtgatgggagtcacgttatttgagagatcttttaggctgggatttcaagggatgctttactcttgtccaattcaacactagggctgagtgaacacctggaaactggctgattatttccttcactacctcaccttcccattcatgcctttaatttcctcaaatagactctcacagttcttagacttaatgaatggtgactggctttcaccaaggtaagccttccaaaaggctcatggagaaggtgcacagcatcacaggacctacctttgaatggcagacagtgtcacttctatgactttacattgatcaagatgagtcacacagacagccctaatcaaaaggagaggactccacaagctgtggttattgtgactgtagtcatgaggggccatccttggcaactagttccactcagaactacttcccatataccaaaaacacaccctgtaaggaatctctgaaggcatacaattataggaacaggcctcagagtaaagtgcagtgtcttatctaatcaggatatggtgtctatgatgtgactacaacttatcacttgcaatctctctcaacatgtgcatcaaaggaacacattatctgctttatacaaatcaagcaaagaagactgaaggagacaggaaaaaaggcaatgaaaacacctattttagaggggcaaaataaaatagacagcagtcactaatctgtatcattggtgaaaccaaccagacacctattttcattttctctgggaatgtttctccgtagcacttgccctcaccctccattctcagcttcttggagttcctaccaagatggcagaataacagccctttccctatgcctggccaacatgttgaaaccacatctctactaaaaatacaaaaattagctgagcatggtggcaggcacctgtaatcccagctacttgggaggttgaggcaggagaatcacttgaacccaggagaaggtgcttgcagtgagctaagattatgccattgcactccagcctgggtgacaagagctaaactccatctcaaaacaaaacaaaaagaaatctaaatataattgagttgaatatttgaattttttattgacatttcaaattagattataattcaatttaaaagagcatctcatagaagcagatgtactcaattatgttaacgctgtggtttcatgtaagcaatttgttttgtgaagggacacaaatccaaccagattttaacagtgtataaatatgtatgtattaatttaattacaatgacaatactctcaactccccatttgaataaaggagagcatctgatctctgttctggggcaccgtgcactataggtgtgtggaaatacagatgccctcagctgtggggtaggctcagtgggacctggagtgctggagcccctgggccattcacctctggctacaaaagtcattgtctatttatccccagctgctatagaaatattattttcagtggctgtcatgatgcaaaagaaaagaagcatggagatttattaaacctttacatataagttatgttagtaaataaagtgaactttcttctggcttaactaaaaaatctatagtagtatttatgccttttggaaaatagagatggcaatttaaatattatgaagcaaagcaactgattatcaggtaagacaaccaactacaactgcagaattgtagaggttatgggttaaatgtataagaatatttcatagcaataatcttttaagactatgcaagagactccacagtggagtagaaattagaacagaattaataatactgtgtatgctctcagttcaccaatttatcaaaactagctttatgatgcaggagggtgtctgcccttttgcaattggaagaaaagaaagaatatttcatttttcgactctttagattttcttcactaacagtatttccacagctaagtaagggatttgcaagtagcatcaagagaaaaaagcaggcttgagcagcttttaaaatatggtcttaaaatatggaaattggagccatgtgtggtggctcacacttgtaatcccagcactttgggagcctgaggtgggaggattgcttgaggtcaaaagtttgagaccagcctaggcagcatagcaagatccccatcgttacaaaaaataataattttttaaaaaatcagctggatgtggtggtgcatgccttagagtcctagttacttgggcggctgaggtaggaggagctcttgagcccaagagttcaagtctgcagtgagctacaattgcaccactgtactctagcctgggaaacaaagtgagactctctctctctctctctctctctctctctctctctctctctctatatatatatatatatatatatatatatatatatacacatacacacacacacacacatacatacatatatatgtatgtatatatacacatatatatgtatgtatatatacacatatatatgtatgtatatatacacatatatatgtatgtatatatacacatatatatgtatgtatatatatacatacatatacatacatatatatgtggaaaagggaaggggccaagaatgtcaaagacattattaaagaaaaggaaagatttctcctgccaaatatcagaagttttataaagctacagcaattaagatagtgtggtcttcattgataaactgaccaatgaaacagaatagagagctcccaaacaaatctccacaaatttaatatttgatatgtgatgcaggtgacatggcagatcagcaaagaaagaaaggacttttcaatacataggaaagaaaaataatggttactgatataggaaacaaaatgaaattatattccttcttcgctctatatacaaacattaaattccagatggaccaaagacttatgtgtcagaaacaaaactttaaaacttttagtagaaaatgtaagtgaatgagacacaaaaagccatttaaccattaaaaaagattagatgttttgactatcacaaaattgagaactttttacatcaaaaagtgaaaagataagctgggcatggtgtctcaagcctgtaatcccaacagtagatcacctgaggtcaggagtttgacaccaggctggccaacatggtgaaaccctgtctccactgaaaatataagaaattagccaggcattggtggcagacactagcaatcccagctacttgggaagctgatgcacgagaatcttctgaacccgggaggtggaggttacagtgagccactgcactccagcctgaatggcagagtgagactctgtctcaaaaaaaaagtaaaaattaaaaaataaaagtaaaaaagtgaaaagataaactataaactagaagaagatatttgcagtacctaaaacctatgaaagattaatatcaaatcaacaaagtataaggagttcctatgaattaattttaaaaatagcatcccaaaagaaaattgggaaaagacattaatagggatttcacaaaagagaatgcccccaaaacataaaaattttctcatcctcattagtaatcaagaaaatgcacaagatactacatatctattcgctccacaaatattaagaagtttgacaataccaaatgtattagtcgacattcacgctgctgataaagacataactgagactgggaagaaaaagaggcttaatggatttatggttccacatggccaaggaggcctcagagtcatagcagtggatgaaaggcacttcttacatggcagtggcaagagaatatgagaaggaagcaaaagacgaaacccctgataaacccatcagatcctgtgagacttattcactataacaagaatagcatgggaaagaccagcccaagggattcaactacctccccctgggtccctcccttaacacatgggaattctgagagatacaattgaagctgagatgtgggtaggtacatagccaaaccatattaatctgctcctggcccctccaaatctcatgtcctcacatttcaaaacctatcatgccttcccaacagtcccccaaagtcttaactcatttcagcattaacccaaatgtctgctgtccaaagtctcatctgataaaaggcaagtctcttctgcctatgagcctgtaaaatccaaagcaagctagttacttcctagatacaatgggggtacaggtaattgagtaaatacagctgttccaaatgggagaaattggccaaaacaaaggggttacaggccccatgcaagtcctaaatccagccaggtagtcaaattttaaagccccaaaatgatctcctttgactccatgtttcacatcaaggtcatgctgatgcaagaggtggactcccatggccttgtgtagttctgcccctgtagctttgcagggtatagcccacctcctggctgttttcatgggctgatgttgagtgtctgaagcttttccaggctcatggtgcaaggtatctggggtctggaggacagtgtccctcttctcacagctccactaggaagtgctccagtagggactctgtgtaggggctctgatccttccacatttcccttccacatggccctagcagaggttctccatgagagccccacccctgtagcaaacttctgcttggacatccaggcgttttcatacatcctctgaaatctaggtggaggtttccaaatctcaattcttgacttctgtgcagttgcaggctcaacaccaggtggaagctgccaaggcttggtgcttgcactctcaaagccatggcctgagttctatgttggcccctttcagccatggctggagtggctgaaacacagagcaccaaggccctaggctacacacagcacagtgatcctgggcccggcccacaaaaccattttttccttgtaggcctctgggcctgtgatgggaggggctgctgtgatgatctctgacatgccctgtagacactttccccattgtcttggggattaacattcagcttctcactacttatgtgaatttcttcaggcagcttgaatttatcctcagaaaatggcattttcttttctatcacattgtcaggctgcaaattttccaaacttgtatgctctgcttcctttataaaactgaatgtctttaacatcatctgagtctcctcttgaatactttactgcttagaaatttcttccaccagataccctgaatcatctctctcaagttcagtgttccacagatctctagggcaggggcaaaatgctgccactctttttgctaaaacataatgagagtcacctttgctcctgttcccaacaagttcctcatctccgtctgagaccaccttagcctggaccttattgttcataacactatcagcattttgtcaatgccattcaacaagtctctatgaggttccaaattttcccacattttccagtcttcttctgagtcctccaaactgttccaacctctgcctgttaccaagtttcaaagtcgcttccacatttttgggtatcttttcagcagcaccccacttcactggtaccatattactgtattagtccattttcacactgctgataaagacaaattcaagtctgagaagaaaaaggggtttaattggatttacggttccacatggtgtgggaggcttcagagtcacggcaggaggcaaaaggcacttcttatatggcagcagcaagagaaaatgaggaggaagccaaagcagaaacccctgataaacccatcagatctcatgagacttattcactatcatgagaatagcacaggaaagactggcccccatgattcagtgacctcaccctgggtccctcccacaacatgtgggaattctgggagatagaattcaagctgaggtttggttggggatacagccaaaccatatcaacaaatatggagagactgtggatcaacaagatcatctcgaattaatacaggaggtgagagtttaaattagaacaaccactttggaaaataatttggattatcttataaaaatgagcattcttccaggagctggttttttgaaaggatcaacaaaattgatagaccgctagcaagactaataaagaagaaaagagagaagaatcaaatagacgcaataaaaaatgataaaggagatatcaccaccgatcccatagaaatacaaactgccatcagagaatactacaaacacctctactcaaatgaactagaaaatctagaagaaatggataaattcctcgacacatacaccctcccaagactaaaacaggaagaagttgaatctctgtatagaccaataacaggctctgaaattgaggcaataatcaatagcttaccaaccaaaaaaagtccaggaccagatggattcacagctgaattctaccagaggtacaaggaggaactggtaccattccttctgaaattattccaatcaatagaaaaagagggaatcctcccaaactcattttatgaggccagcatcatcctgataccaaagcctggcagagacacaaccaaaaaagagaattttagaccaatatccttgatgaacattgatgcaaaaatcctcaataaaatactgacaaaccgaatccagcagcacatcaaaaagcttatccaccatgatcaagtgggcttcatccctgggatgtaaggctggttcaatatatgcaaatcaataaatgtaatccagcatataaacagaaccaaagactaaaaccacatgattatctcaatagaagcagaaaaggcctttgacaaaattcaacaacccttcatgctaaaaactctcaataaattaggtattgatgggatgtatctcaaagtaataagagctatctatgacaaacccacagccaatatcatactgaatgggcaaaaactgaaagcattccctttgaaaactggcacaagacagggatgccctctctcaccactcctattcaacatagtgttggaagttctggccagggcaattaggcaggagaaggaaataaagggtattcaattaggaaaagaggaagtcaaattgtccctctttgcagatgacatgatagtatatctagaaaaccccattgtctcagcccaaaatctccttaagctgataagcaacttcagcaaagtctcaggatacaaaatcaatgtacaaaaatcacaagcattcttatacaccaataacagacaaacagagagccaaatcatgagtgaactcccattcatgattgcttcaaagagaataaaatacctaggaatccaacttacaagggacgtgaaggacctcttcaaggagaactacaaaccactgctcaatgaaataaaagaggatacaaacaaatggaagaacattccatgctcatgggtaggaagaatcaatatcgtgaaaatggccatactgcccaaggtaatttacagattcaatgccatccccatcaagctaccaatgactttcttcacagaattggaaaaaactactttcaagttcatatggaaccaaaagagagcccgcatcgccaagtcaatcctaagccaaaagaataaagctgaaggcatcatgctacctgacttcaaactatactacaaggctacagtaaccaaaacagcataatactggtaccaaaacagcataatactggtaccaaaacagagatatagatcaatggaacagaacagagccctcagaaataacgccacatatctacaactatctgatctttgacaaacctgagaaaaacaagcaatggggaaaggattccctatttaataaatggtgctggggaaattggctagccatatgtagaaagctgaaactggatcccttccttacaccttaaacaaaaattaattcaagatggattaaagacttaaacgttagacctaaaaccataaaaaccctagaagaaaacctaggcattaccattcaggacataggcatgggcaaggacttcatgtctaaaacaccaaaagcaatggcaacaaaagccaaaattgacaaatggatctaattaaactaaagagcttctgcacagcaaaagaaactaccgtcagagtgaacaggcaacctacaaaatgggagaaaatttttgcaacctactcatctgacaaagggctaatatccagaatctacaatgaactccaacaaatttacaagaaaaaaacaaacaaccccatcaaaaagtgggcaaaggacatgaacagacacttctcaaaagaagacatttatgcagccaaaaaacacatgaaaaaatgctcaccatcactggccatcagagaaatgcaaatcaaaaccacaatgagataccatcttataccagttagaatggcaatcattaaaaagtcaggaaacaacaggtgctggagaggatgtggagaaataggaacacttttacactgttggtgggactgtaaactagttcaaccattgtggaagtcagtgtggcaattcctcagagatctagaactagaaataccatttgacccaaccatcccattactgggtatatacccaaaggactataaatcatgctgctataaagacacatgcacacgtatgtttattgtggcactattcacaatagcaaagacttgtaaccaagccaaatgtccaacgttgatagactggattaagaaaatgtggcacatatacaccatggagtactatgcagccataaaaaatgatgagttcatgtcctttgtagggacatggatgaaattggaaatcatcattctcagtaaactatcgcaagaacaaaaaaccaaacactgcatattctcactcataggtgggaattgaacaatgagaacacatggacacaggaaggggaacatcacactctggggactgttgtggggtgggggaaggggggagggatagctttaggagatatacctaatgctaaatgatgagttaatgggtgcagcacaccagcatggcacatgtatacatatgtaactaacctgcacattgtgcacatgtaccctaaaacttaaagtataataataattttttaaaaaagaaaatgacataagaaaaaaaaaaaagaaaaaacagataaagtgcactttgtctgtatttacagcccataatcaagaaatcattgcccaatctcatgtcatgatgatatctgcctgtcattatcatttctcctatcattatcattgaaggtcttacgtttactcattgatacattttgagttcactattgtatatgttataagctaagggaccagtatgtgtaagtccagttttcccagcatcacgtgttgagaagtctgtccttttccaatgcgatggtcgtagcccattgtggactctcaggtgaccctctgtgagtgtttctaggctctctattctactcctttgatttctatgcctctccttaagccagcaccacactgtcatgatattatagctttttaaagaggtcaaacattggccacaataaaatatgcacttccaaagccatttttaggtattatatatcatggattaggctctttttttttattctcaggacctacatggacactatttctcatccttgtgatacaggagttattaagaaataatttttaggtagatagtaagggtaaaagttcttggtggaaattttcctgtaataagaaacaacccccaaaccatctcttttctaacagaaaaggtggcttgaagggccaggagagcaagctttgatatgcaaatactgggtcattagaaacgaggttcactcaatgtggtgattcctgccatcttttccttgtcaccaggtgtaccaagtgtcatggccactttcagataacaccatgtgttcgaaacatcatggcaacccgcatttgcatattaaagggctaagatgggagggccagatttttcacaggctacagaaattacacacctggtcaaaccaatcccctgggccctatggaaaccagaagccgcctcctccagcatcccaatataagcaatcacttttccaccacacatggtttttatgtgtgtgtgtgtgataggtttttatttattattatactttaagttctagggtacatgtgcacaacgtgcaggtttgttacatatgtatacatgtgccatgttggtgtgctgcacccattaactcgtcatttacattaggtatttctcttaatgctttccctccccccatcattctgagcaaactatcgcagggacagaaaaccaaacaccgcatgttctcactcgtaggtgggaattgaacaatgagaacacttggacacagggtggggagcatggggggttttttgttcgaatccccctctctctgtctctgtacgggggagctgttttcttccttccttctttcttgcctatgaaacttttcaccccttaaaaccactccacatgtgtccatgttgttaatcttatcagcacgagaccaaggaccctggttccctccagtcatcggagccatatcttttaggtgcattggccaggaatgggaattcattcatcagactggtgagtatggagcaaatctcaactttaaatctgtcttttaatctctaggctctcttccagctatcctgccaccaaactttctttctctctctacccgcggtctcttactgtctctctcactgtgtctaatgtgcaggaatctttacagttcagggaaacaggtctgttagagaagatcatgaatcaaggcaggcagtaactcaataaacgtctgtctctctaaggtttcgctggtgagcacatggtatttctaagccaaaaccgccacctggtggaaataaaaatcctcttcatgagacacttggttctctgtggtacgttgcagcttcacaatttctccattttgcacttttttactgctacttctgtggacgggaaactctggtttcaaccattaggagtaagatgtcttccacagccagattttagtcccaatattgtcccatcagtaggaaaactgccattcggttcctacactcttttaaggcacctattctgtctccaattaagacagtacttaattggtaaggggatattaagtttagaagttaaccagaacagttttttttaaagggtaaatgcattagcacgggtcataatagcaggcaatctagcacattgcctccattaaaggagccttgcccagaggtgacacagtctccccggagatccgttttcagggagccaggcaaactgcacatgtttaggaaatcaaaggtaaatcacacaaggcagataagctaagactgcatgggtaagcacgggtagccccatcacttagttcatccagctctatggcttggaggaccacacctacagccatgggtggcacatttaacatggtgccgggatccagaaaccagggaggggaagtaatcagaggatgctccctgtctgctcctccactctgggtcataccaaaaggaaggagactaagaagatgctttgtattctttcttctttttctaaatggataataaattatctttaggttgcacccctctggagtgcactctgaaacactgaaacttccttaatctcaaaactgtaaagagaaaagcaatttattttcttttgcacaaggacatggcatttttactaaatgggagggaagcggttctcataaacaaccctaactaaaacttcaatagctcaggaaatgataggaaaaggaagtactttttaatactcactataaaaggcctagaggaaaccagggccaaacctctcagttactctaagctgtctataatgaaccaaaagccagataataattctgtagcctttatggaaaggccaagagaggcactaatagagtacatctccttatcccctaattcaatggaggaacagctcattttgaaggagaagtttattacaaaagcagctcctgatattaaaactaaaaaagcaagcttaggacaaaataccaccttagagaacctcctgcaagtggcgactttggtcttttataatagggacaaggaggagtcccaacaaaagcgggggaatctcaagagaaggacagaggctccagcagcagctttgcaagcttgtaaagtccagaatccccaaggtacatccactagttgctattggcatggcagcccagagcatttttaaaaggaatgcccaggcagcaagatgaagcaaactcaaccctatccaggctgtggcaaaaaccactggaaacagaactacccccagaggcagaggtcactgggttcaaaatcagcctcacagatggtccagcaggaatgatgggtccaagggctccaacattggctccagtgactcaaactgccatagagcacaggagtcctagaggattctggaaatttacaaaaggaaagtaaacctccttctaagcactagagccagtctctctcttttctcctctctaatccaggcctccgctcttctcatagcacaactgtaaagggcatctcgggaaaaactctaatccaatatttttttcaaccttagctgtagttagaaagacctatttacacgtgcttccaagtcattgtcataatagctctactagtcaaaaaagcctccaagttaaccctaggaaataattcaactgtttacagcccacataatgtggcaggatcactgacctctaaggggagctcttagctagtaaacagccagtaaagcaagaagtacataaggcaggatgagcagtagtcactgccccaaacacaagcactcaattagctgagctaatagctcttacaagagcacttaaattaagccagagaaagatagctaacatttctactaactccaagtatgctttcctaattgtccatgctcatgctgctatttaaaaggaaaggcattttcttaccactaatgaatctcccataaaatatcaccaggaaattaataggttattatcctcagtttttcttccacaagaaatagcaggatgcattgtagggaacatcaaaagaaaataaataaggtaagcaaaggaaataaattaactggtcagccagctaagacagaggcaaggaagtctcagggcattaacacaactagtgaaagcccaagtccaggaactaaaaccatctttatttaatccaggaaatttagtattagtgaaaaatctcatctctctccttccctaagccaagctgggaagggccctccactgttcttctttcaaccctctcagtagtaaaatttacaggaatcaactcctgaatacatcacactaaagtcaaagcttaaaaagctgggggagcaacccctaacagtccagagaaacatccagaatgtccatgtggaaaagcagaaaatgttaagctaaaaatcacaaaaattaagtaactgagtaaggtctacccatcttactcagtcccacatttacctcaacatatacttgttgtcatttctgccctttcctgtcaaaatttgccaccaaatattaaaacttctttttaatgtataattgcagaaaattttaatgataaatgaaattgcacttggaactccgtaaatccccaaagggaaatgttatatcttgacaagtaaagttttaaacaaatgttttttactatcccactcttgtgggaattgttatagttatgctactatttgtgataaaactatacactgtggcacccacaatgtggaattctggttgtaaaattctaattcgtgctcctatgagaatctaatgctggggcttatctgacaggaggccactcacgcagtaatgcttacccactgctcacctcctgctttgtggcttctttcctaacaggccacggattgttactgctctatggcttgagggttggggacccctgctctagggtgtatctctttcagggttccaactaaaagcctaactctctctcccacttggcagacaacaacctataatttttgtatcttcagatccacaagactgatagaagttctactctgccaccacctaagaatcaacttctaatttatgatactattttaatttccccaattgtacaaaagcatgtcctttatagctgttttaaaatccattatccaatcaggtttcatgcactttggtgctatacttctttggtctcttttaatctagaacattctccctgccttgttatgacattttttgatgctttttgaatttttgtcatatataaggctccaaaaatgaaaatgagcttggtggtatgaggaattgaaaagaggtcagtatatcaggcatttcttgcaccacgtgttatcctctcagccccacctcttcatccagccattgctaaggtgaccaggtccagacagttgttcactagcttcatgcaggtacacactgacagtgcctctccttagtatctatctttccagtaccttcctctttccagcactgggcttctttgagatggtagaataggacttttgcagaaatcctctcagcacccatgcatttgcaaaccaaagttgtgggagacttaatgccaacaggatgactttttaacaactggggatgggggcagatggataaatacttcctttcatcttctgggcagagagtactaagaaacatttcttatttggtcggggtgagggtgaaaaccaagcttatgccagaaaaagtcatagaaagcagctggaccctcatactgggaacctaaatctcttattgggcagatcactgtaaagatccattgctggtaagtgaagtagtgattacccatggcatactaagtatcacaattactaagtattgcttggtattacaattacgagttcacaatgactaagcatagtcgcctgtgtgttcttggcaggaagtgctgagagaaggtgaagcactggactccagaagctgtggcactagaatggtaggggtacaatgggaatcataggattctggaagtatttggtttggttttaactgcattggaattatttttacaaaaagaaagaaagagctgggctcagtggctcacgcctgtaatcccaggctgaggctggtggatcatgaggtcaggagttcaagaccagcctgatcaacatggcaaaaccctatttctactaaaaatacagaaattggctgggcgcagtggctcatgcctgtaatcccagcactttgggaggccgaggtgggcggatcacgaggtcaggagatcgagaccatcctggctaacacagtgaaaccctgtctctattaaaaatacaaaaaattagctgggtgtggtggcaggtgcttgtagtcccagctacttgggaggctgagggaggagaatggcatgaacccaggaggcagaggttgcagtgagccaagatcacaccactgcactccagcctgagtgacagagtgagactgtgtctcaaaaaaaaaaataataatacagaaattagccaggcatggtggcaggtgcccgtagtcccagctactcaagaggctgaagcaggagaatcgcttgagctcaggaggaggtggaggttgcagtgagtcaaggtcacaccacttaatccagcctgggcaacagagcgagaatccatctaaaaaaaaaaaaaaaaaagaatgaatgaatgaatgaaaaaaggagagggacttattcatgctcaccaactaccaattaaaggcacactttgaacactagatgttcctgatgatagcatttaaagaaaccctcacatcctgcaagcacagggaagagagtgctgagtgctgaaacccatatgtaggatctaatttctaaaaacatggcataactgcaaaggaaactggtggcatggtcttaacaaatgccagattacaaagtgaatgctctgatagttggataactcagcttcctaatatcataacttgctttaaaaaactacagtaatcaaaatgcattcataccagcttaaagataagcctatagaccagtggaacagaattgagagtcaaaataaatctaaacatccatcgtaagttgatttccacaagggtgccaagatcattcaatgtgggaacaaattgtctcctgaataaatggtttttggtttttgtggggttttttgtttgtttgtttttaacttttattttaagttcaggagtacatgtgcaggatgtgcaggcttgttatacacgtaaacctgtcatggaggttttttgtactgaatatccacatgtaaaagaatgaatctggaccctcaccttatactatatacagaaattaactcaaaatggatcaacaacccaaatttaagagataaaactgccaaatatgggccaggcatggtggctcacacctttaatcccagcactctgggaggccgaggagggtggatcacgaggtcaggttcctggctaacacggtgaaaccccgtctttactaaaaatacaaaaaattagcggggcatggtggcgggtgcctgtagtcccagctactcgggaggctgaggcaggagaatggcgtgaacccaggaggcagagcttgcagtgagccgagatcacaccactgcactccagcctgggcaacagagcaagactccatctaaaaaacgccacccttgtatcttaaagtccctcatgactgtactactctgtgcaggccctccaagaatgcggtgttgcttttgctttcctatttttgtaggtggaagcagctctaatggcttccattgccctttcctactatcacattcctccctgcacaggtcagacaaccaatgtgggattctgccatttgctgagtgtgtccattccacttctgcaacctgacactgagcaaataagcagaggatggatgtggggccaactgggcagtgccaggtgcttccagtgctttcactttcacataattccagctgaacttggaaccgacttaaaaacaggatttgattcccctttcacttctacttatgaagacatcaatagatttccaggaaatcccacgtggagaggaaactgattttgtaattcactgcttgagtctgatgcatactctctagttagtatttcagacacaaatcacaggaacaatatttgctgcttgaggaaacagctatgaagacactgagagtagatacagagtgtcttgcctgccctaggtgaactggcaggaaataagaatctctgtgtccctggttgctttaggaaagtagaaacctatagagactaggagaactttctataggtgtgagaaagtgtgtgaggaaaagaggaggatagtggacagcatagagatttctggactgagacgggatttcgggcgtgaataactgagtgagtagcagcgtggaaggggctgtgtctgagctgagcagggctgagtgggaactgcgctctctacactgaaacagagtagggacctcatgggggctcccttcccctatttggactccaaagtgcacaggtgcctccgctcgaccaggaaaaagaagagggaaattcatatgctctctgccctcagttcaggaatgggggatgaaccatcccatttctggaaatgttgagacccagacttagcaaaggctaatttgttgatttaaagagtgctcatagatgaccatgcccttctaccatcctcctttctgacttagaatgggaaaagtcatgtcatagaggaggagctgtgggctcaaatagtggacaaggcagtcagtactttgcagagtgtcaatcttggtcagagatggatgcaaggcaaaccctttgaccagggcacacaatgacatggcttcatgagaagcatggaggctgaagtgcacaacttcccaccctcactccatcatcctcatctgtgccttccctggcgattccctgccccttggtgtgaccctccgtgtcgtttctgctgcagcacagtcacaggcctgaaaactgaaactgagtctatttctgccacccctactcacgctgctgagaaatcttcctggcaggggttcagagaaagaaataaagccagagggcagggccaagagggactatttaagtgctgcaaatcagagactcacacagaagaccagatactattctgaagaactacacagagggagacaacaatgtcatcactaaaagtaagtcaaaagacacagcctttaataaactcaattcacataaaccaagaaagaatcaggggtgatttcacaagacgaaagtatgagagtttctcttgtgaacactttactgagagttgtgggtgtgtgaaagagaaaccgtgcggctatgatatctgagatgctggtggagtgtggggtgtggactctgaaccagtgtaaccgtctgtgagtgcatggtggtgtctgatgagagtaacctctgctgagatgatgtgactttaggtgggaggtgaacagcccaccagggtgggcgggtgtgtgcctgagtgtaagggtgtaactgcgttttgtcttcttgactgtgatgtgagtgtgtgtgtgagcacagctggaccagtgtgtgagcatctttatatgcacagtgagcaggtgtgtgagactcagtgagtggcatggctctgtgagactatgggtgagtgtgtgctgggatgtgactgggtgttgaactgggagcatgcaaggggccttctgtgcatgtaaagtttcctcccaacacagcagcgcctctgatgaagcagctgggcacttcccatgtgtcagtgtgtgtcccatgtgtgaacagtgtgggtggcagaactggtgcgcctgttgtgagccatgagttatggaggagtcatctctgagcagaatgcgtgaatcctcaggtgcctcctcccaagcagagtggggaaaaggaacacagactatggggccgatggttcctcaggtggggtctgtccagaaaggccatctgctcctgcctccagcctcaggtctctctgtctcccagcctgtccatcccattgtgggagaagagggtgagcagatcctggctcactagggaaggcctttgggggatgtgggttcggagactgagtcgcccaaaatagagaaggaatcagtttattcttagttcatacagagcttacagtgcatattaatcaataacttgccagggtttgtggctcatgcctgtgatcccagtggtttgggaggccaaggtggaaggatcgcttaaggtgaggagtttcagaccagcctgggcaacgtagtgagaccctgtctgtacccagaatttaaagattatccaagcatgttggtgtgcaccttcattcacaactactcaggaggttttggcaggcggatcacttgagtccaggagtttgaggccacagtgagctgtgaccatgccactgcaatccaggctgggcaacagagtaagatcctgtatcaaaaagaccccaaaccccaacaccaaacagagaaatgaaaatcaaacaatatttagattacctccaatgacttccctggcccacactcttcatgtgtgcaggtactggggctgtgctgccagcaaggtgtccccttctggaaaggacgtccatggcccttgatgattgtgatgcacacgggggtttccagttcttttagcatttctctctctctttcaacaagtgttgtttctcactggagtgaatctctctactcttacatcctcacatcttgttttcacagcttcagtgttgaaaataatcacaggtcggtgttccagaagcaacctccctgttctaatgggtaacccccaacaggcttcatgcatggcagagattagggcaaaactttcacatatattaattcatatattactggaaaaaccctacaaagcagaaatttctgcttatcctccttgtcctggggaaactgaggcagggagcgttcaagtaatggatctaagattgcactgctagtaagaggcagaatgaggactggaaccaaggcagcatggatcctgaaccattgctctcatgtatgggtcactaatttcttcaggaatatgccgccctgaccgctacggtgggagggaggaggctcacagtttgccctttgacctctagcctcctgcaccataggaatctgttacgggggggaggccacacctggtcctgcccctcccacccactttcaatcccctggcaggtaccacacacacggcctgtgtccttgtctactggttcttgtgtgataatcacagggacaccgatcatccctttcgtgtgagtactccatggtccatggcagggggaggagacgaaagaacatttgctaaagggctgacctcctgtgtgagtgatgtgaaaatgtctagttggcaggatggcagcaccatgcaggtgcaggtcctggagaccctgcaacacctggcatgaaacctgcagtggccgcactgtgagctagtcatggggcctaggggaggaggacactcagggcattgggactgtggctctttatcaagaggcatagaatgttcaggaaattgacaactcataggcctaggtcagtgactgtggctgagtttacatcttgggatgagggagctcttaagggcaggaggggctgaagcagccccacagggacaagactggcagtatcaccaggaaggcctgtgtctgctctggggaaaggggggaagggatttgtgtgtgtccagtgtgtgccccacaagggagagacctgcccaacacaccgtgtgctttaccctcagcatggacccacagctgcaggtggatttccataccgagatgaaggaagactcagacatcgccttccatttccgagtgtactttggtcattgggtggtcatgaacagccgcgtgaatggggcttggcagtatgaggtgacatgccacaatatgccctttcaggatggtaaaccatttaacctgtgcatctccgtgctggccgatgagtaccaggtgagccccccaggagctcccagcacccaccctccatgggctcccagaacaggaggcagctcttcctgagctgaccccaccagttcctcggagccgatctcccataactactcctgccccaggcttttcctcacagagcactctctgcttgcactgccatcctcagttcttcttccagatctgacccagggtcaaggtgggctcacctgccattttccccaaggtggagaatcttgtctgtcttcacccatagttctcattcccatgtatgctgttacttacatagtcattcagccaaatggataaaacatgcatatgaataaggttattttatcagtccaaaatgtagtctttctctcagtactgaaccccaatcctacccccagaacagcagtattactagcttctctacacaaattccagagctaatgtatgcttatggaagcatacagatgtgtggtttcatttctttttaaaccaatgctgttttaagtttctctacacattacactttagaaactggggtggatttgttgtcaaacgctacatgttggagcaatcatccatccatggtgccgcctcagtttttcaacatcatacaatattcctgtagcagggttacccaaaattattgaacttgatccttttgatggacattaggctggttccagtattttgcgctcacaaataaagctttttaacgtaccctttgtcataatgaacctcccaatttccatattggagggtaattacaaaaaatggaataactccttcaaaattgtgtgcattttaaatttcataacttaacacctaaaaggtgactgtctctatagctttagtaataaataaatagtatttccaaactttctaaccttttcttcttcttcttcttctttttttttctggagatggagtctagctctgtcgcccaggctggagtgcagtggcacgatctcagctaactgtaacctccacctcccaggttcaagcgattctcctgcctcagcctcctaagtagctgggaatacaggtgcacacccaccacgcctggctaattttttttttgtagttttagtagagacggggtttcaccatattggtcaggctggtcttgacctcctgaccttgtgatccatctgccttggcctcccaaagtgctgagattacaggcatgagccactgcgcctggccttcttcccaatcttttcaaatgggcagatgcaaagagtaacatttcgtccatatttaagtaggagatccttttcttatgcctttcagccgttcagaataatatcctacgttttgcaacacctgttttgttcctcctctctgaaaacatttgaatttccttctttgccaccaccattacatctctgggcaactccaaggagaaactgggccatcagcagtcatagtgaatgggagttatagttcatggaactgaaatgtatgcattcaatgaacactgtccagcactaaccccatggcaggccctgtgcaagacgcaaggattgaagttcatgagagacagtcccaggccatagggatcttccaggtgagaggagaggctgagcaaacaggttctgtgatacacagggtggtaaaacctccttggaggaatgagaggaagcattggaaataaatgagcaactgtctgaagtaggcacaagggtaatctgcagagagaagtgtgtctactgggttctgatgtataattaggggatttctggttggatgctgtaggcactagggctgagtgagatgatgctgaaaacttgtttgatggcatattgtatttctgatgcatttttttcttttgtaggtaatggtaaatggccaaaatgcttacagctttccccaccgactcccaccatcttatgtgaagatggtgcaagtgtggagagatgtctccctgacctcagtgtctgtctgtaattgatgaaatgatcacattcctcatggttaaagaatccctgtttctgtgcgaccatggcatttccagagcctgctaacagaacgatcactcctcaccccttcctctacacttggtcattaaaacttcaccaaattttccagaatctggttcttactttcatggagaaaaagacaaagtggcacaaggacacaagtgacacaaggccactgtgatgtctgagattacataacgaagacatccttttatgtcagcccgtactttacgtcagacactctgaaccaaaattcctccttcattgtagatgactcactccagtgaaatgttgggtagctgtttacaacctcacaggcataattgattttggggagaagctttgtaatttgaggaaagtcatatgaaatgtcttcattcttgcactcattctaaggatgtttcctgtgtcttaatactgtgtctggcgttgtgcaggaagcactgaaaaagccgaggaaatactgaccaagtttgcacctgaaattttgttttgttgttgttctttgagacaagttcttgctctgtcattcaggctggactgcagtggcaccattaaggctcactgcagcctcgacaccctgggctcaaaaattcctcctgcctcagccccccaagtaggtgagaccacaggtgagcaccaccatggccagctaatttctgcatgttttttttgtagagatggggttttgccatgttgcccaggctggtgtcgaactcctgaagtcaagcaatccagcaacctcggcccaccaaattgctggcattacaagtgtgagcccctgtgcttggcctatacctgaaaatttcaatccaagccatagttagagaaccacaagagttcaataatttccctcaaaaaatccctttgtcatgttcaaaagaactgccagatttttctattttatgtgggcagaatcctggatctcctctttggaaataaatggtcatagttttagatcggaaaatatgtcatttattggtggaatgaacacaattcattcacatggacacagtgagccgaccctgctttgctgctgctaccgttggcattgcagaaccggaaacctccccaacacatattcacataaagcaaccatttattctgatgtctccctgctttgcaggtttactggactcatgcgggtggtagacacgcatgtgtgtgggagtcacgttttctgaaggacctacaggctgggatcccagaggattcttcacttatgtttgactcaacactaagggtgagtgaacacctgggggctggctggttgtctccttccctacctcccctacacattagtgtcttgaattttctgaaatcatgaaggcctcatagttgttggacttaatcaatgattactgtcttccaccaaagaaggactttcaagaaaccaaagaagaagctgccaggcatcatagaacttagctttgaaaattggagagtgtcacttttctatgacattatattgattaaggtgagtacagacagcccaaatcatggggaggggcctccacaggttgtggttgttttgattattggtcatgatggggtcctttttggaaccaagttccactgagtctccactggcttacagactgttcacataccaagagaagtaaccctggaaacaactccagaaagcaataccattgtaggaagaggctcagagtgaagtcccgcatcttatcatccaatcaggacctggtgtccatgaggtgactacacattgtcaggtgcactttctctcaatgtgtgcactaaggagacaaattattggcccttaacacatcaaacacccaatactgaaacacacataggaaaaatgcaattcacacacctgatttaagcattatttgaaaaagaaaagaaaaagaattttacatcaaaaggacaagaagatttttaaaaggagaatgaattgaagagaggaagaagaaaatagacagcagtcactgggccacatcattgctgaagccagccagacacctatttatcattttctctaggactggttctcagcaacaatcggcttcaccctccactcttcccttcttggagtttctaccaagatggcagaatgacagtccttttccctctataagagctgagatcacctgcttcatagcaaacctggagaaccacttagcagaaacaacatgttacctacaaactaatgaaggcagattgagtaaagtcctgtcaaatagcctctttttccacacggcccaagtcaggcatcattttgatcatcctcatcctctctccccatgttcattgccgcagtttgttcacctccaaccttactcatgggtatgctcctctcctacccgcattcaacctaacacccagatacctgaggtgccaacacacagccagtgctactcctcattcctttcttccacgtttcattcccatatggaatgaaattccctcctctctcactggacactcttgggttcagtttaggtccactctcctccttacacctttctgctctcagtgttgttcacttttctattttgataataggtcataggcctcatcacctgtatggaattcattttttgtggaattttagaaggtgacactgaccttatcaggggctcaccttcagcctagcacctaaatgtgcagaggcaagtggacaaaaaggaactgggaatagagtccaggcttcactcagtacctctttgtagtgacagcagaaagagtagtatgggtggtgggtgtgagatgttgtgtcacgggaacggagaacaggaagtgtttcctgggcactgagaagtgtctcctgtctcacggtgacctcttccccagcacagtttagctgcagaatacacactgttgtcctcagcacatagatcattctcaaagatagaccatatgttgtcatgaaaccagtcttgaaacattaaaaaaaaattgaaatatgtaatcccagcactttgggaggctgaggccagtggatcacgaggtcaggagatcaagaccatcctggctaacacagtgaaaccccgtctctactaaaaatacaaaaaattagcctgggcgtggtggtgggcacctgtagtcccagctactcgggaggctgaggcaggagaatggtgtgaacctgggaggtggagcttgcagtgagcagagatggcgccactgcactgcagcctgggcaacagagcaagactccatctcaaaaaaaaaaaaaaattgaaataatatcaagccacttctttgaccacaatggaataaaacaagaaattggtagcaagaggagttttggaaactatccaaatacatagaaattaaacagtatgtacctgaatgaccagtgggtcaatgaagaaattaagaagaaaattaaaagttttcttgaaacaaatgataatgaaaacataacataccaaaatgtatgggatacagccagggcagtataaagacggaattttatagctctaagtccccacatcaaaaaagagaaaagcttcaaataaacaatataatgatgcatcttaaagaattagataagcaagagcaaaccaaacttaaaattagtagaagaaaataaataataaagatcagagcagatacaaatgaaattaataaaaagtgttttttctgataatttaaacaaaattagcaaaccttagccagactaagaaaaaagtagagaagatatagataaataaaatcagaaatgaaaaaaagacacattacaactgataccacagaaattcaaaaaattattagtggctactctgagcaactatacaccaataaattggaaaatctagatgaaatgaacaaattcctggatacttacaacctatcgatattgaacctggaagaaattaaaagcctgaacagtccaataataaataataaaatagaagccacaataaagtctcctcataaagaaaagcccaagacctgatgccttcactgctgaattctactgaacatttaagaaaaaattaatgccaatcttaccgatactattcagaaaaacagaggagggactattactgaactcattaaaagaggccagcattatcttgatatcaaaaccacacaaaaacccaccaaaaaaggaagagaaaccataggccataggccataggccaatatctctaataaatattgatgcaaaaatcctaaacaaaacactagcaaacctgaagggggcctgccccttcacacctgtgggtatttctcgcaaggtggagatgagagactgagaaaaggaaataagacacagagacaaagtatagaggaagaaaagtgggcccaggggaccagcactcagcaagtgagacctgcaccagcactggtctctgagttccctcagtatttattggtcactatctctacaatcttggtgagggagatgtggcaggactatagggtaatggtagggaaaccattaccaaatcagcaggaaaacatatgagcaaaggaatctgtgtcataaataagtttaatgaaaggtgctgtgcctggatgtgcacgtaggccagatttatgtttaactttacacaaacatctcagagcagtaaagagtagcagagcagtattgctgccagcatgtctcacctccagccatagggcggttttctcctatcttagtaaatagaatgtatggtcaggttttacactgagacattgcattcccagcgacgagcaggagacagatgctttcctcttatctcaactgcaaagaggccttcctctttcactaatctccctcagcacagaccatttacaggtgtcaggctgggggactgtaaggtctttcccttcccatgaggccatatctcaggctgtctcagttgggtgaaacctggacaatacccaggctttcttgggcagaggtccctgcggccttctgcagtgcattgtgtccctggttaatcgagaatggagaatggtgatgacttttaccaggcatactgcctgcaaacaaattgttaacaaggcacatcctgcacagccctaaatccattaaatcttgattcaatacagcacatgtttcggtgagcacagggttgtgactaaggttacatattaacagcatctcaaagcagaacaatttttcttagtgcagataaaaatggagtttcttatgtcttcctttttctacatagacacagtaacaatctgatctctctttctttgccccatacaaaccaaattcaacaatacattagaaaggttgaccaggcatggtggctcatgcctgtaatcccaacactttgggaggctgaggggagtaattacctgatgtcaggggtttgaaaccagcccgaccaacatggcaaaaccctgtctctactaaaaatacaaaattagtcaggcgcagtggtgagcgcctgtaatcccagctatttgggaggctgaggcagaagaataacttgaacccagaaggcagaggttgcagtgagctgagatcacaccattgcactccagcctggatgacagagcgagacttcttctcaataaaaaaaaaaaaaaagaaggaaagatcatttatcatgtccaaatgggatttattcctggaatgcatggatggttcaacatatgcaaatcaattaatatgatacctcatatcaacagaatgaagaacaaaagccatatgatcattttaattgatactgaaaaagtgtttgataaaatgcaacatttcttcacaataaaaaccctaaaaaaattcgtgatggaaggcccataccttaaaataataagccatatatgacagacccacagctagtgtcatactcaatgaggaaaacctgaaagccttttgtctaagctctgaaacactacaaggatggccgttttcacactgtcattcaacatagtaccagaagtcttagctagaccaatttgacaagagaaagaaacaaagggcatccaaattggaaaggaggaagataacataatcttatatttggaaaaacctaaccactccacaaaaaactactagaactgataaacaaatttggtaaagttgcaggatacaaaatcaacatataaaaattagtagcatttctacatgcaaacaaggaacaatctgaaaaaggatttaaaaagctatcttatttacaatagccacaaagtaaattaagtacccagaaagttacttaacgaaagaattgaaagatatctgaaaaagtctaaaaaacgaatggaagaagttgaagaggacaccaaaatggaaaaaaatattccacgttcatggattagaagagtcaattttgttaaaatgtccatactaccaaaggtaatctacagattcaatgcaatctttatgaaaataccaataacattcttcacaggtgtagaaaaacaatcctaaaatttatatgaaattataaatgactgagaatagccaaagccatcctaagcaaaaagaacaaaactggaggaatcacattacctgacttcaaattacactacagagctatagtaacaacaacaacaagaacaactacaaaaagcatggtactggcataaaaacagaaacagaccaatggaacagaatagagaacccagaaacaaatccacacacctacagtgaactcattttcaacaaaggtgccaagaatatacactgggtaaaagacagtctcttcaataaatggcataggggaaactatgcagaagagtgaacctagaaacctatatctcctcatgtacaaaaatcaaatcaaaatggagtaaagatttcaaactaagatctcagactatgaaagtactagaagaaaatacggggataaatcttgaggacatttgttctggcaaaaatttcttgagaaataccccacaaacacaggcaaacaaagcaaaaaaaacgaacaaatgagataatgttaagttaaaaaactgcctagcataggaaacaatcaaaaagtgaagagaaaacccacagaatgggagaaaatatttgcaaactaattgcctgacaaaggattagaatggtttgaattccttgacaaaaaaaaagtgaagagaaaaatgaaataagagggagaaggaaggaaggatggaaggaaattctaattcactccacatttgaattctaatataggttttaaggatgcttcctttcatcacaaaaagaacttgaggaggggtcctgagtcctccaccccaggtgaagaagactgcattgtgactcaagtccaatcacctgtacctgcacctgtcctcacacaggtctggaactaagaaacaaataaccaataactagacttaagaatctcaactttctccacaaatttgcaggagaaagggtgtctctgaaaatttggattcccatggacgctcagagaaaagaaaagggtgtgggtggagcccaggtgtgtgagaggcagatgggaaagaccctcacctggcaaagccaaggggaccagtgtgggatcagggggacacaagggctttctctacctccctccataggtcctgcttaggatcaagaccagtgttctgtcagaacatctgtagaccaaaagaagtgttacctcccagggcaaatgattttcaccaaaatcctcactatttttaccattgcacagattaggaaaattaggaaatgtacattctgcacagtggagagaaggcttaatgagaggcatgggggctggacttcacaacccctcaccctcatcctcactccatcatccttgtctgtgcatttccctggtgaccccttcctccccctggtgtcttccccaccgtcatttctgctgcatcacagacacaggcttgcaaaaaagtgtggttatgactgagtctgtttctgataccctggggctatggtgtctgagacgttgcatgttgtcaggtgtggaccctggaccagtgtaaccttctgtgagggtgtgatggtgtctgatgagagtgaactctgctgagatgatgtgactttaggtgggaggtggagagcccaccaggatgggtgggatgtgcctgagtgtaaaagggtgactgttttgtcttcccgactgtgatgtgagtgtgtgtgtgagcaaggccagaccaatgcatgagcatctttataggcacagcgagcaggcatttgtgactcagtgagtggggtgactctgtgcgactatgggtgtgtgtgagtgctgggatatgactgggtgttgaactgggaacatgcatgtggccttctgtgcatgtcaagtttcctcctcacacagcagggcctctgatgaagcagctgtgcatcttcccatgtgtgtcaatgtggatgccaggtggcagaactggtgtgaatcttggggactgtgagttatcaatgactcatttgtgagcattaatgagagcagaaagcatgctctctagatgcctcttcccaagcagagtgggaaagaggaatgcagatcataggagtgatgtttcctcaggtaggttctgcacacagtgaccaccatctcctgtctttcagcctcatgtctcttcctggctcccaccaaagcctgcccttcttattgtgggtctggagagtttgcagatcctggctctctaaggaagagcattagagtctgtggtttcggatactaaatcaccctaaaccaggaaggaacaagtgtagcctcagttcagacagagtttacagtggatattaatcatcagagtagctgggttcactggctcatgcccataatcccagcactttgtcaagcaaagatgggaaaataacttgaggccagaggtttgagaccagcctgggcaatatagtgagatgctgtgtttacaaaaacttttaagtatcagacaggcattgtggcaggcctctttcatcacagctactcaggaggccaaggcatgaggatcccttcagcacaggagtttgtggctttgtgagctattggtgcaccactgcatgtcagcctgggtgacagagtgagatcatgtttcaaaaaggaagaaaaattatacacttgtaggttctctctaattacttccctgacccacacttttcatttgtccaagtgctggagctgtgtcctcaagatttttacaacttctgggaaggacgtccattgcccttgatgactgtgatgcacgtgcatcccacacacaggggttttctgttctttttcaatttccctctctctttcaacaagtgttgcttcttactggagtgaatttctctgctgttacatcctcaagtctagttttcacagtttcagagttgaaattgatctcaggtcaatattccacaaggacccaatccatagtgttaggtcacccccaacaagccctgtacatgccagggattaggctaaagattttacacgtattaacttctgtcactaaaatcaccctacaaagtaagaatttctaataaagacaaaaaagtaaaaagtaaagaaagcaaagaaaaataagagttttaaataatcctcctggtacctgggaaactaaggtaggcagcattcaagtaatagatctaagatggcacttccagtaagaggcagaatcaggagtggaatccaggcagcctgactcctgaatccttgttcctaactatgggaccctcatgtcttcaggaatatggagtcctgactgtgatagggtgaaaaagagaagtcctcactgtttgcctgttgatttctaaccttctgcatcatgggaatctgttagaaaaggggaggccacacctggccgggcccctctcacccactctcagtcccctagcaggtgccccacacaatgcctgtgtccttgtccattggttctaccatgacaatcagagggacaccgatcctcccttttttgtgagtactccatggtccatggcacgggggtggaaaagaagggagaatatttactcaggaagtggcctcatgtgagtgatgtggaaatgtctagttggcatgataaaggcaccaattaagttgcaggtcctggagaccctccagcaccaggcatgaaacctgcagtggttgcactttgggccagtcatgtggcctaggggaggaggacactcagggattgggggtgtggctcattatcaaggggcatagacttttcaaagaatggacaagtaatagctcaggtcagtgactgtggctcagtttccatcttgtgatgagtgacagagcatgtccccacctgggggaatgaggtgctaaaacagccccacagaaaccagtcctgcagtatcaccagggagcctgctttcttctttggggaaaggggggaagggatgtgtgtgtgttgagtgtgtgccccacgagggggaggggcttgcccaacactctgtgtgctttgccctcagcaatgacccagagctgcgggtggaattctacactgggacaaatgaggactcagacatcgccttccatttctgagtgcactttggccattgtctggccattgacagccatgtgtgtagggcctggaagtgtgaggggagatgccacaatgtgcccttttaggatggcaagccatttgatctgagcatcttggtgctggacaatgaataccaggtgagtgccctaggagctcccagtacccagccctccatgggctcccagagcaggaggcagctctccctggcttggccccaatagtccctctggacccacctcccataactagttttgctttgggcttttcatcaaaacgctctgcttgcgccatcatcctcagctcttttcccaaatctgaccagggtcaatatcagctcacctcgcatttcccccaaggtggagaatctcctctatcttttcccattgtggtcacttccactttatgctgttatttaaatttttcacttcgctgaatgaatacaatattcctaaaaataaaattgttttagtcaatcaaaaattaagtctatctcattcctggacccaatcttactcctgagaacattaccagtgctctgttctccttccacaggaaatctttgcttatggaagcatatagatctatactttcatttgtttttaagaaattcctagtatacattgctttacacattaccctttaggaactgagttaatttgttgttaaaaatatatatcttgaagacatcttctattaatggtgctgcctcaatttttaaagattgcataatgttgcattagagcaattacccaaaattattgaccttgactcttttgatgggcattgaggttatttccaatattttgctctcacagatggtgctgtaataagatttctagtaaattcttttgtcattatccacctctcttacttatgatgaaaaataatcagaaagaaatgaaataacaggttcaaaaatgtgtgcattttaaatttaacaaattgacacctagaaggttactttacagccttagtaataaagaatatgtccaaatgttctggctctttctaatgtgtagggcaaacgccaaaagattcacattttattcagattcaagtgagggatctttatctgtgcttagaagctgtttaaaatgatatcttatgttttgcaacacttgtccgattctacctttccaaaaacacttgaaatctattcttggccaccaccagcccagatctaggtaactccaaagagaaactgggccatcagcgtgagtggcagtcagagttcataaaactgaaagatatgcattcaacgaatatagtctagcattaatcctgtgtggactcctgtacaagatgcagggattcaagctcatgaaacagagtcactatctatgggggttttccaggctagaggggaggctgagcaaacatagaccagccttgctggaagtatgagaggaaaaattagaaataaagcaaacaactgtctcaaataggtacaaaagttgatctgcaaacagaagtgtgtgttttgagttcagttatataactaggagttttctcacgggatgttgtaggtactaggacagagtaaagaggaggctgaaagcttgtttggtggcatactgtctttctaatgcatttttccttttgtaggtaataataaatagccaacactgttgcagctttgtccataactcccaccatgttctgtgaagatggtgcaagtgtggagagatgtctccctgacctcaatgtctgtctgcagttgatgcagatgatcacactcctcattgttgaggaatccctctttctatgtgaccataggatttccagagcctactaacagcatgatctctcctcactgtttctgctacacttggtcattaaaacatcaccaaactaccgaggatttgtttggttcttgctttaagggagaaagagaaagtggtcattcccaggagggcccaaggaattctatgagaggcatcaagaaatcaaaaaggataagccttcgtgtgacttcaggagtgagtgacaaggtccctggaatgtctgagaagacattaggtacagcatccttctatatcacattgttgacatcagagactctgaaacaaaatccttactcaatctcagatgactcactgcactgaaatgttaggtagctgtttacagccacacaagtgtacctcagggaagaaatttggtaacttgaggacaatctggtggaatttcctaattccttccattgttctcaggatatttattgtgtataaacatggtgctttggtctgtaaagactgccatgcaggacctttaaaaagagacacatttctgacatgaaaattttaatccaaacaatagttagagaatcacaggagcccaaaaatttctcttaaagaacctcaaatgttgatgtttaaagataattgtgagttttttctgatgtatgtggcagaatccttagatttctatttggaaacaaatggtcatggtttaagtccagaaaatatgtagtttattgttgggatggacagaattcatacacatggacacagtgagcagaccttgctttgctgctgtttcactaggcattgcagcacagcaaacctcccaacacatgttggcttagagcaatcatttattctgacctttctcagttaactggactcatgtgagaggtaggtcatgtggtgagaatcatgttttccgaagcatctttcaggctgggattccagaggatgcttcactgatgcctgacccaacactagagctgggtgaacatctgggggctggctggttattttattccctacttcacctccccattcatgccttgaattttctcaaatcatgagagtctcatgattcttagacttaatgaatgataattggcttccactaaagaaagccttccaaaaggctcaggaagaaggtgcaaggcatcataggacctagctttgaaaggcacacagtatcagtactgtgacattatattgatcaaagtgagctatacagacagcccaaatcaaagggtggggattccataagctgtggttattttgacctgttgtcatgagggagcatttttggcaactattcccactcattcctcagtggcttaaatgctttccacattccaaaaacactatcctgtaaggaaccactgaatgcaatatgattacagaaacaggctcagattgaagtttagagtcttatcgtttaatcaggatctggtgtccatgaggtgactacaaattatcaggtgcactttctctcaacatatgcattaaatgaatacattacctcccctatacaaatcaaacatacaagactgaaacagatataggaaaatgcagtggacacatctattttagaagggcaaaaaataataaacagcaccctgaaagcaagatggtcaccaatagctctactggagctacccacgaaaattcagccagggttctcactcttgttacatctgctcaaaccagcatggccttatccaaaaatactgtcttgatgtgtgccgcttgtgtttccataagtacttaaaggatatatttttcattaagttggactaagtgatcttccttgaattgatatgcaagacttacatccaatgaaagaaactgtgctagcacattaaacatgaatagagattaaaacaaagaaacaaataaaaacaaacaagaacaaaaaagaaaataggcagcagtcactcgtccacattattggaccctattttcatcttctctgaaagtggttccctgtgacaattggctccaccatctattgtcagtttcttggaactcctaccaagatgacacaatgacagcccttttctcgatacaggagctgtggtcacctggttcatagaacaaaaagagaaccacttagaagataaacagcaaattacctaaaagccaaacaatgcagattgaagagggtctcatcaaatagcctctttgtcagcagggcccatatcaggtggcattttgatcatcctcatcctgtcttcccatgtttattgccgcagcttgttcaacagcaaccttactcatagatatgcctctctcctttccctcctttaacctaacatccagttaccttgaggtgtcaatgcacagtaaataatacattcatgcctctcttttttgtttctttccagtataagctgaaattttctcccctctcactggaaagtctcaggttcttgttaggtatactcacctccttgtatcatcccactcacagttttggtcacttctctattttgatgatggagcataggcctcctcaccagcatggaagtcatttttgggcaattaggcaattcttgctcagagtggattaagactatcttggaacccataacccatgaagttttttttttttttgagatggagtttcactcttgttgcccaggctagagtgcagtggtgtgatctcgggtcactgcaacctccaccttccagtttcaagcaattctcctgcctcaacctcccaagtagctgggattagaggcatctgtcaccatgtccgcctaatttttgtatttttagtagagaaggggtttcaccatgttggccaggttagtctcgaattactgacctcaggtgatacacccacctcggcttcccaaagtgccgggattacaggcgtgagccactgcgcctggccagaacccatgaatttctgagcagaacatgagtttaatttcatatctatatgtccctggatgattccaattgtatttgaataacctacagggtcctacatgctgcctgtgctagacaaacacacagtgactgccttttcttaactgatattcaccagctcagttcagttcacataggccatttgttacactcatctttatactacctactatcctgtgctcatggtagccaggagtgatgtctcagataaaaagataacacatagagaccaggaagcaatgttcaacaagcaagttttgatttgcctctggggacctactcaacatctttttcatgctcctcaacctaaattcactaaatacagcattcccactaaatatagcattgctcaaaacacagaaggttattcttggactctaaagccttgccttctgaaaggtctggagggcttttcagtttttgctgaaagcccccaaagaataaatctagtctttgaaaatgtccttgatgcctaagtccaccaaagctgtttcctctggggtgctgtccgtgatgctgagcactggtgcttctaggcctgtatttgcaagtgaggggctaataaaacagaattaggagataaattttttgttttgttttgtatttgataaattgcagctcaaaatatgcatgatatatggagcaggaaatgaatttggattttcaaaccacaatttctgcaatgccttctatcaccacttttattcagcatagtatttgaagtaccagccagagagttcagcaagagaaagaaacaaatggcatccaaatagagaacaaggttaaaccatccatgtttagagatatgattctatatctggaaaacctcacagtttccacccaaacgatcgttaagctggtaaacaactttcgcaaagtttcagcatacaaaatcaatgtgcaaaaatcactagaattcctacatgccaaagacaacgaaccacagggccaaatcaagaatgcaattccattcacaatttccataaaaagaatagaatatctaggaatacaactaactgggaggtgaaagattgttacaatgagaattacaaaacactgcttaaaaaagtagagaagacccaaacaaatggaaaaacattccatgctcacagatagcaagaataactatcattaaaacaaccacattgcccaaagaaatgtacagattcaatggtattcctattgaactatcaataacattcttcacagaattagaacaatctattttaaaatgaatattttaaatattaattgaaccgagtgggttgaataaaagatattccaaagcaaaaagaacaaagctagaagcatcacattacccaacttcaagctgcactatagggccagagtaacctaacagcatagtacttgcataaaaacagacacatagaccaatggaacagaaaagagaggcaagaagtaaggtcccacacctacagcaatctgatctttgacaaagttgaccaaacaagcaatggaaataatttttggataactagctagccacgtgcagatgattgaacctgaaccactttcttgcgttatatagaaaaatcaactgaagatgggttaaagacttaaatgtaaaacccaaaactataaaaaccctggaagtctacctaggcagtaccataccgaatgtagaaataggcaaaagattcctgacaaagatgccaaaagcaatcacaagaaaagcaaaaattgacaaatggatctatttaaactaaagagcttctgcacagcaacagaacctatcaacagagtcaactgacaacctacagaataggagaaaatatttgcaaattatgtatctgaaaattgtctaatatctagcttctataaggaactttaacaactttacaagaaaagaacaaacaaccccataaaaaagtgggcaaagggctgggtgcagtggctcacgcttgtaattccagcactttgggtggctaaggtaggtggattgcttgagtccagaagttcaagaccagctttggcaacacggcaaaaccctatctctatgaaaaatagaaaaattagctgagtcttgtctcaggcacctgtaatctcagggactcaggaaggtgagctgggaggatcgcctgagcccaggcagaggttgcagtgagacgagatttcaccactgcacttcagcctgggtgtcagaccaggctgtctcaaaaaaagtagacaaagaacaggaacagatacttcttaaaagaagacatacatgtggccaacgagcatatgaaaagaagctcaacagccctgaacgttagaaaaatgcaaatcaaaaccaccatgggataccatctctcaccagtcagaatggctagtattcaaaagtcaaaaaataacagaaactggcaagtttgtgaagaaaagggaacacttacacatttttggtggcagtgtaaattagtttaatcattgtggaaagaaatgtgatggttcctcgaatggctaaaatagaactaccattcaacccagctatcccatcactgagtatatacccagaagaatataaatcattctaccataaaaacgtgcacatgaatgtttattacaacagtatgcacaatagcaaaaacatggactcaacctaatagctcataaaggacagactggatagagaaaatgtggtacatatacaccatagaatactatgcagcctcaaaaaagaatgagattatgacttttgcaggaacatggatggagttggaggtcattaaccttagtgaaccaatgtggaaatgaaaaacaaaatactgcatgttctcacttagaagtgtgagctaaatgatgaggcccatggataccaagagggaaacaacacacactgagacctacttaagggtggagggtaaaaggtgagacaggagcagaaaaaataactattgggtactaggcttagtacctggatgtgaaataatctttaccgcaaaccccatgacacgagtttccctgcatatgtacccctgaacataaaataaacgtttaaaaaacaaagaaaaaaaccaatgtcacctttcttctggaatctgcaggagaaacagtgtctctgaaactttgattcacatggacatcaagagaaaggagagagtattgctagagtccaggtgtgggacagacagatgagagcagccctcacctggtagagccaaagggcttagcatggggcaggttcatgcaaggacgttctctacctcccccccggatcatcctgaggatcaagggcagtgctgtcccagaatctttaaaggcaaaaagaacaatttaaaggcagaatgtatgatctgtaggtgtctctttccaataagtgtggggaagaggaatacagactacgggggtactggtcccttaggtgaggtctgcacagctggtatgcagtaccagctactcaggatactgagctgggaggatcacctgagcccaggagccagaggttgcagtgagccaagatggagccacaccactccagcctgaatgtcagagtgagacctgtcttaaaacaacaacaaaaggcgagaaaagacaagaacagagaacagatacttttcttttcttttcttttcttttttttttgagatgaagtctcactctgtcccccaggctggaatgcagtggcatgatcttggctcactgcaagctctccctcccgcattcatgccattctcctgcctcagcctcctgagtagctgggactataggcgcccgccaccggcccggctaatattttgtatttttagtagagacaggggacgcttctcaaaagtacacatacaggtggccaacaagtatataataaaagctcaatatcactgaacattagagaaatgcaaatcaaaactacaatgagataccatctcacaccagtcagaatggctcttcttaaaaagtcaaaaaaggacagatgctggcaagggtgtggagaaaaaggagcacttacagattattggcggtggtgtaaattagctcacccattgtggaaagcagtgtggtgattcctcaaagagcttataacagaactaccattaaaccccgcaatcccattactgggaatggtgtatacactactgtatacacagaagaatagaaattattctgccttaaagacatatgcatatgaatgttcattgcaacactgtgcacaatagcaaagacacagaatgaacccaaatgccatcaaggacagattggatacagataatgtgatacatatacacaatggaatactatgaagccctaaaaaagaatgagttcatgtcttttgcaggaacatggatggagctggaggccattatttttagcaaactaatgcaggaacagaaaaccaaatactgcatgttctcacttataattgtgaactaaatgatgagactcatggacaccaataggggaacaacacacacagaagcctacttgaggttggagggtgaaaggtgagataggagcagagaaaataactattgggtactacgcttagtacccaggtgaagaaatcatatgtaccacaaacctcatgacatgactttatctgcatatgtacccctgaacctataataaaagtaaaaaaaaagaaaaaagaaaaaaaatctcatctttctcccagaatctgcaggagaaacaatatctctgaaactttgttttacatggactccaagacaaagcagagaatgcagctagagcccaggtatgtgacagacagatgagagtgaccctcacctggcagatccaaggggcctagtgtgaggcaggttcatgcaagaactatctctacttctcttcccagatcctcctgaggatcaaggtcaaaaggatctgacccttaaaggccctcccagaacctttaaaggcaaagagaagaattaccttctaggtctaacgtctttttccaaaattcccaattttttatttttagtcattgtacaaattgaggaaatgtacaccttctggctagattctgcatactggagaaaaagcttgagaggcacaaaggctgggctttacaatccctacccctcactccatcatccttatctatgcatttccctggtaacccaatccacagcctggtacctcccccactgtcatttctgctgcattacagacacagacctgcaaacatctatggttgtgacagagtttctttctgacacctgagtctttctcctgctgcacggaaagcttgctgggaggggcttggaatctggcatgaagccaaagggcatctctgagttgcagcatttaaatgatcccactcagagattcacacagaagactggacacaattccgaagagctgcccagaaggagagaacaatgtcatcactacccgtgagttgaaaagtcacagccttcaataatctcaagtcacataaaccaagaaagaaacaggggaggttttctgagttgaaaatatgagcattcctactgtgaatgcattaccgagagttgtgggtgtgtagaagagaaaccctgaggctgtggtatctgagatgattgtgggtgtaggctgtggaccctggaccagtgtaaccctctgtgagggtgtggtggtgtctgatgagagtgaactctgctgagattaagtgactttaggtgggaggtggatgacccaccaggaccggcaagtgtgtgagtgagtgtaagggggtgagtgtgctttgtcttcctgtctgtgatgtgagtgtgtgtgggcacagccagaccagtgcatggtcatctttatgtgcacagtgagcaggtgtgtgtaactcagtgagtggcatggctctgtgtgactatgggtgtgtgtgctgggatgtgactgggtattgaagggaaaacatgcacgtggccttctgtgcatgtgaaggttcctccccacacagcagcacctctgatgaagcacctgtgtgtcttttcatgtgtggcaatgtggatcccaagtggcttaactggtggggatcttggggattgtgagttaccaaggactcgtttcagatcacttatgagagcgaaatatatcatcagtagatatctcttcccagtaagagtgaggaaaaggaacgcagattatgggagagatggttcctcaggtggggactgcacagagtgatcactggcttttgcctcccaggctcagcttccctgtcgctagcccagcctgttcttcccattgtggaacaggcgagtgtgaagatactgatttgccagggaagaatattagaggccgtggttaaagagacggaatcaaacaaaatatccactgtaagctctgtctgaactgagactaaacttgttcctccactcatgaaagaacaagctgtctgaattcagacagtgcttactgtggacattactcaacaaagcagctgggttcactggttcatgactataatcccaccaatttgggaggcaaagatgggagggtaacttgaggccagaaatttgagaccggtctaggcatcatagtgatatgctttctttaaaaatctttaaatatctgactggcagagtggcagacacctttcaccccagctacacaagagggggcagatgtgtgaggatcactgcagtccaggagttcgatgtttcagtgagctgtgattgcaccactgcatatcagcctgggtgacagagcaagaccctatctcaaaaatacagaaaaatcatcaaccacttgcagtcgtcgtagaaatcaatcattccctccagttatgtccctgacccacaggcttcatttgtgcaagtactggggctgtgctgtcagtaatgtgtgccgcttctgggaaggacgtccattgcccttgatgattgtggtgcgtgtacatcccacacacaggggtttcctgttctttcgtcatttccctttctctttcaacaagtgttgtttctcactggagtgaatttttaaattctttcaccctcaagtcttgttttcattttctgagttgaaaataaggcaggtcagtgtttcaggaggactcccctgttctgttaggtcacccctaattgaccctatacatgccagggattagggtaaaagttttacctatattaactcctctattactgagaacaccctacaaagtaggaattcctgatagtcctccttgtcctggggaaactgaggcagggagaggttaagtaatagatctaagattgcactgctagtataaggcaaaatgaggactggaatccaggcatccgggctcttgaacaattgctcttacctatggatccaccatatcttcaggaatatggggccctgactgtggtagggtgaaaggggagaggcctcagagtctgacctttgatctctaacctcctgcaccatgggaatctgttacataggggaggttacaccttaccctttagctctcactcactctccataccctggcaggtaccatacacactgcctgtttccttgcctgttggttcgtgcgtgataatcacagggacaccgatcctcacttttgtgtgagtactccatggtccaatggagggggtggaggagagaagggagaatatttgctaagggtttaaccttatgtgtgagtgatgtggaaaactctagttggcataatgaaggcctcatgcaagtgcaggccctggagaccttccagcaacagacatgagacctgtagaaactgcatgcaggccagccacggaacctaggggaggagaacactcagtgggtttgggttgtggctctttattaaagggcatagaattttcaggaaatgaacaagtcataggcccatgtcactgactggcgctcagtttttgtctggggatgaggaacacagcatctccctgcctgggggcatgaggagctaaagcgtccccacagggaccaggactgcagtatcatcggggagactttttgccctgggtaaaggggggaagggatttgtgtgtgtggcgagtgtgtgtctgcacaatggggggacctgcccaacatgctgtgtgctttgacctcagcaaggacccacagctggaggtgaatttctacactgggatggatgaggactcagatattgctttccaattccgactgcactttggtcatcctgcaatcatgaacagttgtgtgtttggcatatggagatatgaggagaaatgctactatttaccctttgaagatggcaaaccatttgagctgtgcatctatgtgcgtcacaaggaatacaaggtgagtacttcaggatcttccagcgctggagctctgtgggctcttagagcaggaggcagctttcattgacctggtgccaccagtcccttggggcccatcttccataactattcctgtttcaggttttcatcacagagcaccctctgcttgcactgccatcctcagctctttcccaaatctgaccaagatcaaggtcggctcacctgccatttcctccaaagtggagaatctcctctgtcttttcccatagtgctcatttctacttatgccatttttaaaattttcatttagctgaatgtatactatatacttaagaaaaaggtggttttaatcattcaaaaattatgtttcaattttgggcccaattctactcataagaacaccattactagagttctgctcttcttcagaaagaaactttttatttttttatttttttgagacagagtctcactttgtcatccaggttggagtgcagtggcgtgatcacagctcattgcaaactccaccacccagattcaagcaattctcttgccttagtctcccaagtagccggaattacaggtgcatgccatcacaccttgttaacttttgtatttttagtagaagaagagtttcaccatgttggccaggcttgtcttcaactcccgaccttgtgtgatttgctcaccttggcctcccaaaatactgggattacaggcataagccaccgtgcccagcctttcagaggaaatcttttcctatggaagcatgtagatatgtctatgattgcatttgtttttaagcaaatcctggtgtaagttgctctacacattacactttagcaactaagttgatttgttgtcaaagaatatatcttgaagacattatcaatccacggtgccgcttcagtttttaaagattacataatattgcattaaaaagtttacccaaaattattgaacttgacccttttttgggcattaaagttgtttccagtattttgctctcacaaatgatgccgtattaagttttatagtcaatcctcttgtcattactaatttcccaatacttatactggaagataattagaaaaaaatgaaaaaaacagctcaaaaatgtgtaaattttaaatttgaaaaattaacactaagaaggtgactttctctatagcctcgacataaggaatatatccatagtttccattctttttggctttctctaatgagtaggccaaaagattcacatcttattcagattcaagtgagggatcttttcctaggcttaaaagttgttgaagataatatcctatgttttacaagacctgtcctcctttaactctctaagaaccctgggtttcattctttgccactaacacctcagatgtaggctactccaaagaggaactgtgccatcagtagtgaaaggcagtcacagttcatggaactgaaaagtatgcattcaatgaacatggcctcgcactaaccctctggcaggtcctgtgcgagatgcagggtctcaagttcctgagacaccgtccctggtgatggggatcttccaggttggaagggaggccgagtaaacggactgtgtgacacggtgtataacttcactaggggaatgagagaaaacattagaaataaaatgagcatctgtctcaaataggcacgaaacatagcctgtaaaatcacagaagtgtgtctactaggttcacttgtgtaactaggagttttcatggggaaggttatttgtaactgggcagagaagagaaagggctgaaaacctgtttggtggcatgctgtctttctgatgcatttttcctcttgtaggtaatggtaaatggccaacgcatttacaactttgcccatcgattcccgccagcatctgtgaagatgctgcaagtcttcagagatatctccctgaccagagtgcttatcagcgattgagggagatgatcagactcctcattgttgaggaatccctctttctacctgaccatgggattcccagagcctactaacagaataatccctcctcaccccttcccctacacttgatcattaaaacagcaccaaacttcacatgattggttcttgctttaagaggggaaaagaggaagtggtcatccccaagagggtccaggacattctatgggaggcatcaggaaatcaaaggggataaaccttcctgtgacaaagggagtgagtgacaaagtccctggaatgtctgagaagacatcagaaacaacattcttctatagtaggtagttgatgtcagacagtctgaaccaaaatccttacccaatgtcagatgactcactgcactgaaatgttaggtagctgtttacagccacacaggtatacctagtggctgtgggcagaacctgtaacttgagggaaatcatgtggaattccttaatttttttcattgttctcaggatgcttattgtgtaggcacattgtgaagttttcaatctaagtagtagggaaatattggagcctagtgttttccttaaagaatctcaattattcttatttccaaatattcaaagatttttccattttatgtgtgcagaattaaggggtttctctttggaaataagtggtcatggttttagatcagagaacatgtagattattattggaatagacacagtccatgtacatggacacagtgagcagacgctgctttgctgctgttccagtgacaaattgtagcatagcacacctcccaacacatattgactaaaaacaatcattaattttgatctctgccagctttacaggtttattcaactcatgtgagtggtaggtcatgtgatgagagtcatttacagagaaatcttttaggctgtgatttcagaggatgcttccctcctgtccaactcaacactagggctggatgaacacctagaaactggtgggttatctctttcactaccacacctttccattcattccttgaatatgttcaaatcaggagagtctcacggttctcggacttaaggaatggtgattggctttcagcaaagaaagccttccaaaaggctcatggagacagtgcatggcattataggacctacctttgaatggcagacagtgtcacttctatgactttacattgagcaagttgagtcacacagagagccctaatcaaaaggagaggactccacaagctgtgattattgtgactgtagtcatgaggagccatctttggcaaccagtttcactcagtcgtaactggcttatatacttcccacatactaacaacactaaccctgtaaggaatctctgaagacattactataacaggaacaggctcagagttaagtgctgtatcttatctaatcaggatgtggtgtctataaggtgactacaaattatcacttgcaatctctctcaacatgtgcacaaaagggacacattatccgctttatacaaatcaaacaaaaaagacaaaaagagataggaaaaaggcaatgaacacacctattttagagaggcaaaataaaatagacagcagtcactaatccatatcactggtgaaaccaaccagacatctattttcattttctctgggaatgtttctctgtagcacttgtcctcaccctccattctcagcttcttggatttcttaccaaaatggcagaatggcagcccttttcccactgtaagagctgtgattatctgcttcatagcatgtatggagaaccacttaggagaagagaaacaaaatattatctaaaaatcaatgaaggcaggatgaagagagtcccaccaaatagcctctttgtttgcaaggaccatcttaggtgtcattttaatcattctcattttctctctccatgttcactgcaacagtttctgcaactccaacctcactcatgggtatgcctctctgcttacccctcctttaacctaacatccagataccttgaggtgccaacgcacagtgaatggcactcttcatgcctctcttccttgtttcttttcagtatggaatgaaattccctcccctctcactggaaactcttgtgttctgattagatacactgtcctccttacaccttccctgtcacagtcttgatcacttctttattttgataatgaattataggccctatcaccagcatggaattcatttttggggggaattgtgtaatttgtgctctgagtggatgcaaactatcctgaaaccactggcttcatgagcagaaaacgacttggatttcacatcaacttgccgcttgcctggcagtcattttatttgaataactgacataattttacatgccggccctgttaggcaaacacacagtgattgtcctttcttgaatgatattcaccacctcagtgcacttcctaaaggtcattcgttacattcatctttattcagctgctactctgtgttcatagtggtcaggaattacatcttagatacaaagagattacatagagtccagggtgaatgctcaactaataatttttgaattgcctctgaaaatctactcaacatttttcctcctcctgctcaatcaaaattcattgtcttctcccagcaaaaaggggattggtcaaaaagcagaaactctttaatgaactctaaagcctcctcatctcaaaggtcttttggtctttccagttataacagaagcccccaaagaataaatatactctgtgataataatgtccttgatgcctaactctctcagtgttgcgattcctctgggatgccatctgtgatgctactaaacattggtgtatgtgggcctctatttgcaagtgatggaccaagaagatagaataaaaaagaaatttaaaaaatttccccattttatttatttttaccattctttaacttttcttttaagttcaagtgtgcatgtgcaggtttgttatataggtaaaccccttgtcacaggtgtttgttgtatagattatttcaccacccaggtactgagcaaagtaccaatagttattttttgtgctcttctccctcttctcaccctctgctctcaaataggccccagtgtttgtcatttacttctttgtggttatgagttctcatcgtttagcttccacttataagtgagaacacgaagtatttttcttctggtcctgcattaatttgctaaggttaatggcctctagctccatctatgttccctcaaaagacatgaccttgttcttttttatggctgcataatattccatgatgtatatgtaacatattttctgtattcaatctgtaattgatggacatttatgttgattccatgtgtttggtattatggttttagtttgcatttccctgatgattagtaatgttgaacatttttttcatatatttattggcagtttttacatattttttgtctttgtactgaaattttattttatttttatttttttaactcattaatttagtttattttttcccataagttattgtgatacaggttgtatttggttacatgagtaagttctttatttgtgatttgtgagattttggtgcacccattacccaaactgtgtcatatttgtagtcttttatccctcatccccctccactcttcccccccaagtccccaaagcccatcatattatttttatgcctttgtgtcctcataggttagctcccacatatcattgagaacatatgtttgttttccattcctgagttacttcacttaaaataatagtctccaatctcattcaggttactgcaaatgctgataattcatttctttttgtggttgcatagtattccattgtgtgtgtgtatatatatatatacctacacacacaatggatatatatgtacctttttttaatccatttgttgattgatggacatttgtgttggctccacaattttgctattgtgaattgtgtcactagaaacatgcatgtacaagtattcttttcaaatattaacttcttgtcctctgggtagatacccagtagtgggattgctgaatcaaattgtagttttatttttagttcttttaaaaatctccacactgttttccatagcagccatactagtttacattcccaacagcagtatagaagtgtttcctgatcacctcatccatgccaaaatccttttttatttattattttttattatggccattcttgcaggaatgaggtggtactgcattattgttttgatttgcatttccctaataattagtgatgctgagcattttttcatgtgcttgttggccatttgtatgtcttcttttgagaattgtctattcatgtccctagcccgctttttgatgtggttgcttttttcttgctgatttgtttgagttccttgtagattctgaatcttagtcttctgtcagatgcatagtttgtgaatattttttcccactctgtgagtggtctgtttactctgctgattatttcttttactgcacagaagatgtttagtttagatagatctcatttatttattttcgttgcatttgcttttgggttcgtagtcatgaattctttacctaagccaatgtctagaagagtttttcaatgttatcttcttgaattttattttatttcattttattttaattttattattattatactttaggttttagggtacatgtgcacaatgtgcaggtttgttacatatgtatacatgtgccatgttggtgtgctgcacccattaactcgtcatttagcattaggtatatctcctaatgctatccctctcccctccccacacccatgacagtccccggtgtgtgatgttccccttcctgtgtccacgtgttctcattgttcaattcccacctatgagtcagaacatgcggtgtttggttttttgtccttgcgatagtttgctgagaataatggtttccagcttcctccatgtccctacaaaggacgtgaactcatcattttttatggctgcatagtattccaaggtgtatatgtgccacattttcttaatccaatctatcattgttggacagtggggttggttccaagtctttgctattgtgaatagtgcctcaataaacatacatgtgcatgtgtctttatagcaccatgatttataatcctttgggtatatagccagtaatgggatggctgggtcaaatggtattgctagttctagatccctgaggaatcgccacactgacttccacaatggttgaactagtttacagtcccaccaacagtgtaaaagtgttcctatttctccacatcctctccagcacctgttgtttcctgactttaatgatcgccattctaactggtgtgagatggtatctcattgcggttttgatttgcatttctctgaaggccagtgatggtgagcattttttcatgtgttttttggctgcataaatgtcttcttttgagaagtgtctgctcatatccttcgcccactttttgatggggttgtttgtttttttcttgtaaatttgtttgtgttcattgtagattctggatattagccctttgtcagatgagtaggttgcaaaaattttctcccattttgtaggttgcctattcactctgatggtagtttcttttgctgtgcagaagctctttagtttaattagatcccatttgtcaattttggcttttgttgccattgcttttggtgttttagacatgaagtccttgcccatgcctatgtcctgaatggtattgcctaggttttcttctagggtttttatggttttaggtctaacatttaagtctttaatccatcttgaattaatttttgtataaggtgtaaggaagggatccagtttcagctttctacagatggccaaccagtttcccagcaccatttattaaatagggaatcctttccccattgcttgtttttgtcaagtttgtcaaagatcagacagttgtagatatgtggtatgatttctgagggctctgttctgttccattggtctgtatctctgttttggtaccaataccatgctgttttggttactgtagccttgcattatactttaaagtcaggtagtgtgatgcctccagctatgttcttttggcttaggattgacttggcaatgtgggctcttttttggttccatatgaaatttaaagtagttttttccgattctgtgaagaaagtcattggtagcttgatgggaatggcattgattctataaattaccttgggcagtatggccattttcatgatattgattcttcctacccgtgagcatggaatgttcttccatttgtttgtgtcctcttttatttcattaagcagtggtttgtagttctccttgaagaggtccttcacatcccttgtaagttggattcctaggtattttattctctttgaagcaattgtgaatgagagttcactcatgatttggctctctgtctgttattggagtataagaatgcttgtgatttttgcacattgattttgtattctgagactttctgaagttgcttatcagattaaggagatttttgggctgagacgatggggttttctagatatacaatcatgtcatctgcaaacagggacaatttgactccctcttttcctaatcgcatgccctttatttccttctcctgcctgattgccctggccagaatttccaatactatgttgagtaggagtactgaaagagggcatccctgtcttgtgccagttttcatagggaatgcttccagtttttgtccattcagtatgatactgcctgtgggtttgttatagatagctcttattattttgagatacgtcccatcaatacctaatttattgagagtttttagcatgaagcattgttgaattttgtcaaaggccttttctgcatctattgagataatcatctggtttttgtctttggttctgtttatatgctggattacgtttattgatttgtgtatgttgaaccagccttgcatccgagggatgaagcccacttgatcatggtggataagctttttgatgtgctgctggattcggtttgtcagtattttattgaggatttttgcatcaatgttcatcaaggatgttggtctaaaattctcttttttggttgtgtctctgccaggctttggtatcaggatgatgctggcctcataaaatgagttggagaggattccctctttttctattgattggaatagtttcagaaggaatggtaccagctcctccttgtacctctggtagaattcggctgtgaatccatctggtcctggacgttttttggttggtaagctattaattattgcctcaatttcagagcctgttattggtctattcagagattcaacttcttcctggtttagtcttgggagggtgtatgtgtcgaggaatttatcaatttcttctagattttctagtttatttgcgtagaggtgtttatagtattctctgatggtagtttgtatttctgtgggatcagtggtgatatcccctttgtcattttttattgcatctatttgattcttctctcttttcttctttattagtcttgctagcggcctatcaattttgttgatcttttcaaaaaaccagctcctggattcattaattttttgaagggttttttgtgtctctatttccttcagttatgctctgatcttagttatttcttgccttctgctagcttttgaatgtgtttgctcttgcttctctagttcttttaattgtgatgttagggtgtcaattttagatctttcctgctttctcttatgggcatttagtgctataaatttccctctacccactgatttaaatgtgtcccagagattctggtatgttgtgtcttcattctcattggtttcaaagaacatctttatttctgccttcatttcgttacttacccagtcgtcattcaggggcaggttgttcagtttccatgttgttttgcagttttgagtgagtttcctaatcctgagttccagtttgattgcactgtggtctgagggacagtttgttataatttctgttcttttacatttgctgaggagtgctttacttccaacgatgtggtcaattttggaataggtgtggtgtggtgctgaaaagaatgtatattctgttgatttggggtggagagttctgtagatgtccattaggtctgcttggtgcagagctgagttcaattcctggatatccttgttaactttctgtcttgttgatctgtctaatgttgacagtggggtgttaaagtctcccattattatggtgtgggagtctaagtctctttgtaggtctctaaggacttgctttttgaatctgggtgctcctgtattgggtgcatatatatttaggatagttagctcttcttgttgaattgatccctttaccattatataatggccttctttgtctcttttgatctttgttggtttaaagtctgttttatcagagactaggattgcaacccctgcctttttttattttccatttgcttggtagatcttcctccatccctttattttgagcctatgtgtgtctctgcacgtgagatgggtttcctgaatacagcacactgatgggtcttgactctttatcgaatttgccagtctgtgtcttttaattggagcatttagcccatttacatttaaggttaatattgttatgtgtgaatttgatcctgtcattatgatgttagctggttattttgctcgttagttgatgcagtttcttcctagccttgatggtctttacaatttggcatgattttgcagtggctggtaccggtttttcctttccatgtttagtgcttccttcaggagctcttttagggcaggcttggtggtgacaaaatctctcagcattagcttgtctgtaaaggattttatttctccttcacttatgaaacttagtttggctggatatgaaattttgggttgaaaattcttttctttaagaatgttgaatattggcccccactctcctctggcttgtagagtttctgccaagagatcagctgttagtctgatgggcttccctttgtgggtaacccgacctttctctctggctgcccttaacattttttccttcatttcaactttggtgaatctgacaatcatgtgtcttggagttgctcttctcaaggagtatctttgtggcattctctgtatttcctgaatctgaatgttggcctgccttgctagattggggaagttctcctggataatatcctgcagagtgttttccaacttggttccattctccctgtcactttcgggtacaccagtcagacatagatttggtcttttctcatagtcccatatttcttggaggctttcttcgtttctttttattcttttttctctaaacttctcttctctcttcatttcattcatttcatcttccatcactggtacactttcttccagttgatcgcatcggttactgaggcttgtgcatttgtcacttagttctcatgccatggttttcagctccatcaggtcctttaaggacttctctgcattggttattccagttagccattcgtctattttttttttcaaggtttttaacttctttgtcattggtttgaacttcctcttttagctcagagtagttggatcttctgaaggcttcttctctcaactcgtcaaagtctttctctgtccagctttgttccgttgctggtgaggggctgcgttcctttggaggaggagaggtactctgatttttatagtttctggtttttctgctctgttttccccccatctttgtggttttatctacctttggtctttgatgatggtgacgtacagatgggtttttggtgtggatgccctttctctttgttagttttccttctaacagccaggaccctcagctgcaggtctgttggagtttgctgaaggtccactccagaccttgtttgcctgggtatcagcagcagtggctgcagaacagcagatattggtgtaccgcaaatgctgctgcctgataattcctctggaagttttgtctcagaggagtacctggccctgtgaggtgtcattccacccctactggggggtgcctcccagttaggctactcgggggtcagggacccacttgaggaggcagtctgcccattctcagaactcaagctgcgtgctgggagaaccactcctctcttcaaagctgtcagacagggacatctaagtctgcagaggttactgctgccttttgtttgtctgtgccctgcccccagaggtggagcctacagaggcaggcaggcctccttgagctgtggtgggctccacccagttctagcttcccagccactttgtttatctactcaagccttggcaatggcaggcacccctcccccagcctcactgccaccttgcagtttgatctcagactgctgtgccagcagtgagtgaggctccgtaggtgtaggaccctccaagccatgtgctggatataatctcctggcgtgccgtttgttaagcccgttggaaaagtgctgtattagggtgggagtgacccgattttccaggtgctgtctgtcactcctttctttgactaggaaaggaaattccctgaccccttgtgcttcctgggtgaggcaatgccttgccctgcttcggctcatactcggtgctctgcacccactgtcctgcactcactgtccagcactccccagtgagatgaacccagtacctcagttggaaatgcagaaatcacctgtcttctgcatcgctcacgctgggagctgtagactggagctgttcctattgggccatcttggctccaccccctattatgccaattttatagcaaagcaaactaagtcaccaaactgtaatcccattactgggtatatacccaaaggattataaatcattcttctataaagactcatacacacatatatttgttgcagcactgttcacaataacaaagacttggaaacaagccaaatgcccatcaatgatagactggataaagaatatgtggtacatatacaccaaggaatactatgcagccataaaaaaggatgagttcatgtcgtttgcagggacatggatgaagctggaaaccgtcattctcagaaaagtaacacaggaagagaaaaccaaacaccacatgttctcataggtaggagctgaacaatgagcacacatggacacagaggggaacgtcacccactggggcctgtagaggggtggggggctaggggaagaatagcattaggagaaatatgtaatgtaggtgacgggttgatgggtgcaccaaaccaccatggcacgtgcatacctatgcaacaaacctgcaggttctgcacatgtatcccagaacttaaagtatattaataaaaaaattatatatatatatatatatatatatatggagcaggcagttaattttttccttaagcaagtaattctcagaaaggtgctatttggggaaatgctaaaatagaggatgctcagcataaaggctaagtaaaagaaaaacataagaaataaaacacaatgaacagctatatacatgctgaaattttaagatctgagcttcatatttaattcaatttgtcactctgaagttaagtcaaaactgacttttcaagcaagctttttcttctgccaatctgtcaaaccacatgaaaatatagatgatgagtaaaagcaaagaaataaaatctgggctgggtgtggtggctgacacctgtaatcctagcattttgggaggctgaggtgggaggactgcttaagctcaggagttgggagaccagccgacgagatctcgtctctattcaaatttttttaaaaatttggcatggtggcaggcctgtagtcccacctactcatgaggctgaggtgggaggatcacttgagcccaggagattgaggctgcagctagctacagttctgccattgcattccagcttgggtgacagagtgaggccctgtctcaaaaataaatctgtattctgattgtaaaggtaacatatacaaaaaaaaaaaaaaaaaaaaaaccaagggtagaaaatgtggactatcaaaaaacaaatattctattataaactataccagccagagaaccctattgttacaaattttgtttgcaaaactgataccaattctggggagtctaggaagagaaaacagaaattgcaaaggtgcagaggcaggaaatcatatgagactttcaagaatctgaaaatagaaacttggaataaaaacctgaggaggacagggaaatagtagaagatgaggcttcagttgatcataaaccacctcttccagttgcagatccataaaatgtggttaccataggtaggttaattttatccatgctttactatctgcttcctttatcagcaaaccgtcattggttcatgaagactgctcctctgcagatctagccttatgatggctttctatcctcttggcaggaaaggaaaagtgacgtgtgtgtttgtgtgtgtgtatgtgtgtgtatttagtatagtacatttttagaaataacttcctattttctctaaatagaaatgactgaaaataaaatattgtttaataatatttgtaagtggattattagtttttataaatttttgtatgtttttactaattataaaataactttctcatttaaattaaaacattttaggaaaaaccagtcttaaatattattggtaaaatacaaatatcttcaagatgtaaaaatatggtctaaattacacaggtcatgtactacatttactaaatgttttaaggttgtaaactactttttttggccttttaaaaactgtcaacttgcctacttcacaaatgataaggtctaggaacatatggaagtaaccatgcccctaactatactggaaggagtcaaactctacctacacctagcacataatttaaaaaacttactaggttttacattcaggttaaaaattgctaagaattgcctttatgacacacaattgagactactgaaaatatatttatatacaaggtatataaaaacagtaaaacgtgtttagtaaaagataataagaagacatgaaaacatacattttttctaagaataaaaaattgccttacataagagaaaactgaagatttaaacaaattggagaaaaattgtaaaaatattacaaaggaaactgtatgaacatattgactaaattcaaaaagatattatatacaaacagtttttcagaccacagtgcaatcaaaatagaactcaggatgaagaaactcactcaaaactgcaaaacaacatgaaaactgaacaacctgcccctgaatgacgactgggtacataacaaaatgaaggcagaaataaagatgttctttgaaaccaatgagaatgaagacacaatgtacaagaatctctgggacacatttaaatcagtgggtagagggaaatttatagcactaaatgcccacaagagaaagcaggaaagatctaaaattgacaccctaacatcaaaattaaaagaactagagaagcaacagcaaacaaattcaaaagctagtagaagacaagaaataactaagatcagagcagaactgaaggagacagagacacaaaaaacccttcaaaaaatcaacccaggagctggtttttgaaatatcaacaaaatggactgctagcaagactaataaagaagaaaagagagaagaatcaaatagacgcaataaaaaatgatataggggatatcactactgatcccagagaaatacaaactaccaccagagaatgctataaacacctctacacaagtaaactagaaaacctagaagaaatggataagttcctggacacatacacactccaaagtctaaagcaggaagaagttgaatacctgaatagaccaataacaagttctgacattgaggcagtaattaatagcctatcaatcaaaaaaaaagtccagtaccagacagactcacagccaaattctaccagaggtacaaagaggagctggtacttttccttctgaaactattccaaaaatagaaaaagaggaaatcctccctaactcattttatgaggccagcatcatcctgataccaaaacctggcagagacacaccaaaaaaggaaaatttcagccaatatccctgatgataatcgatgcaaaaatcctcaataaaatactggcaaactgaatccagcagcacatcaaaaagcgtatccaccatcatcaagttgacttcatacctgggatgcaaggctggttcaacatatacaaatcaataaacataatccatcacatacacagaacccatgacaaaaactgcatgattatctcaatagatgcagaaaaggccttcgataaaattcaacagaattttcatgctaaatttcatgctaaaaattctcaataacctaggtatcgatgaaacatatctcaaaataataagggctatttatgacaaacccacagccaatatcataccaaatgggcaaaaactgaagctttccctttgaaaaccggcagaagacaaggatgccctttctcaccactcctattcaacatagtattggaagttctggccagggcaatcaggcaagagaaagaaagaaagggtattggaataggaaaagaggaagtcagattgtctctgtttgcagataacatgattgtatatttggaaaactccaccttctcagcccaaaatctgcttaagctgataagcaacttcaacaaagtctcagaatacaaaatcaatgtgcaaaaatcacaagcattcctatacaccaataacacagagaaccaaatcatgagtgaactcccattcacaattgctactaagagaataaaatacctaggaatacaacttacaagggatgtgaaggacctctccaaggagaactacaaaccactgctcaaggaaataagagaggacacaaacaaatggagtaatattctgtgctcatggaaaggaagaatcaatatcatgataatggccatactgcccaaagtaatttatagattcaatgctatccccatcaagctaccactgactttctttacagaattggaaaatactactttaaatttcatatggaaccaaaaaaagagcctgcatagccaagacaatcctaagcaaaaagaacaaagctagaggcatcatgctacctgacttcaaactatactacaaggctacagtaacaaaaacagcagggtactggtaccaaagcagatatgtagaccaaaggaacagaacagagacctcagaaataacaccacacatctacaaccatctgatctttgacaaacctgacacaaacaagcaatggggaaaagatcccctatttaataaatggtattgggaaaactggctagccatatgcagaaaactgaaactggaccccttccttacaccttatataaaaatcaactcaaaatggatcaaaaacttaaacataagacctaggaccgtaaaaatcctaggggaaaatctgggcaataccattcaggacacaggcatgggcaaagacttcataactaaaacaccaaaagcaatggcaacaaaagccaaaattgacaaatgggatctaattaaactaaagagcttctgcacagcaaaagaaactatcatcagagtgaacaggtaacctacagaatgggagaaaaattttgcaatctatccatctaacaaagggctattatccggaatcgacaaagaacttaaacaaatttacaactaaaaaacaacccaaatgaaaagtgggtgaagaatatgaacaaacacttctcaaaacaagacatttatgcagccaacaaacatatgaaaaaatgcttattatcactggtcattagagaaatgcaaatcaaaacctcaatgagatacaatctcatgccagttagaatggcaatcattaaaaagtcaggaaacaacagatgctggtgaggatgtggagaaataggtacacttttacacgttggagggagtgtaaattagttcaaccattgtggaagacagtgtggcaattcctcaaggatctagaactagaaataccatttgacccagcaatcccattactgggtatatacccaaaggattataaatatttgtactataaagacacaggaacatgtatgtttcttgtggcagtattcacaatagcaaagacttggaaccaacccaaatgcccatcaatgatagactggataaagaaaatgtggcacatatagaccatggaatactatgcagccagaaaaaaaggatgagtttgtgtcctttgcagggacatggatgaagctggaaaccatcattctcagcaaactatcacagatcagaaaaccaaacaccgcatgttctctcttgtaagtgggagttgaacaaagagaacacatagatacagggaggggaacatcacacacaggggcctgtctgggggttgggggctaggggagggataacattaggagaaatacctaatgtaggtgacaggttgatgggtgcagcaaaccaccatggcacatgtatacctgtataacaaaactgcacgttctgcacatgtaccccggaacataaagtatgtgtgtgtgtgtgtgtgtgtgtgtgtacaaaaaccagagaaagagcctacactaaagtttaacataggctaggtctcattcattatgatttgagatttaggcttccagctttaaagaatgttgctttaaccttctcttctccctttactttggactgttcattctgtaagtttaagtacactatcattaagaaaaaatgcacaagtcaaatggtttgttatctgcaaagggctcattgtggcatctcacctcacatttccaagccccacacacatggctgttcatgaccacataatgaccaaagtacactcagaaatagaaggcaatgtctgacttctcattggttccagtatgggaatcatccacctgcagctgtgggtccttgctgagctcaaagcacacagcaggttgggcacacactccacacacaccaacccttttccaccttttcccaggccaaacaggagccttcctgatgacactgcaggctttatccctggggggctgcttcagctccttgtacccttcaagagtgagatgctctgcccctcatccctagataaaaactgagacacaatgacagactttgtcctatgagttgtccatttactgaaaacttaatgccacttggtaaagagccacagccccaatcctctgagtatcctcctcccctaggccccatgactggcccacagtgcaactaatgcaggtttcgtgcctggtgcaggagggtctttaggacctgcacttggatgatgcctccatcctccaactagacatttgcgcaccactcacacatgaggtgagcatttagcaaatattctcctttctcttccatcatcctgccatggaccatggggtactcacaagaaagtaaaaacactgtccttctgaatgtcacagaaccaatagtcaaggacacaggtcgtgtgtgtgacacctcctatggagattgagagtgggtgagaagggaaggaccaagtgtggactcccctcctataacagattcccatagtgcaagagtttcgagatcgaagggcaaattctgaggactgctccccctacactaccacagtcaaggtttcatatttttgaagaaattgggggcctataggtaagagcaagggttctggagccaagctgcctggattccagttctgattctgcctcttacttgcagtgcaatctcagatccataacttgaagtctccccacctacgtttctccagaacaaggaggagtataaggagttcctactttgtagggttttcccagtaacagaggagttaatatgtgtgaaacctttgccctaatccccggtatgtacagggccagttaggggttgcaccacagaatggggaccgtccttatgggacactaacctgcattcattttcaactctgaagtgctgaaaacaagacctgaggatgtgaaaacagagaaattcacccagtgagaacggttttataaaaatagggaaataacaaaagaacagagaacccttgtgtgtggaatgaatatgcaaattacaattttttttatgttgttgtctggtttgcttttctttttttctttctttttgtggatacagggccttactctgtcacccaggctggagtgcggtggcatgatcagagctcactgcagcctcaaactcctggactcaagtgatcttcttacctcagtctcccgagtagctacaaataaaaatgcgcacaaacaggcttggctagttttgaatttttttggtacatacaaggtctcactactttacgcaggctggtctggaactcctgtccccatgcgatcctcccaactcggcctcccaaagtgctcggattacagccatgagccacagcctctggcaagttgttgaatagcatccactgtaagctcttcctgaactaaagctaaactggttatttctctgttttggatgattctgtctctaaaaccatgtcccccaatgtcattccctagtaagccagaatctgctcaccctcttctcccagaacgggatagacagcttgggctgggagacagagagagacctgaggctggaggcagaagttggtggtccctctgtgcagatcccacctgaagaaacagccccaatagactgtgttcttcttttccactctgcttggaaagagtcacctgaggatttatgcattcagctctcatgaatgctcagagacgagtccccggtaactcatgatccccaagatctccactagttctgccacccgggatccacattgacatatgtgggaagatgcacagctgcttcatcagaggcgctactgtgtgaggaggaaccttcccatgcacagaaggccacatgcatgttcacagctcaacacccagtcacatcgcagcacacacacccacagtcacacagagccacgccaatcactgagtcacacaggcctgctcactgtgcatataaagatgctcatgcactggtatggctgtgttcacactcacacatcacagtcatgaagacaaagcacaatcacccccttacattcactcacacactcccccatcctggtgggctaatcatgtcccacctaaagtcacatcgtctcagcagagtttcctctcctcagacatcatcacatgcccacagagggttacactgatccagggttcacacaccacaccccacaagcatctcagataccattaccccagtgtctctcttccacacccctaccattctcagtaaatcattcacaatggaaatgttcatattttcatctcataaaatctctctttccttttttagggtgacctgagattattgaaggctgtgccttttcaactcatgggtaacagtgatattgttgtctccctctgggtgactcttctgaattgtgtccagtattctgtgtgaatctcttggagttgaagcatttaaatgatccctgtcagccctgccctttggcttcattcctgattccagccaccttccagcaagattcccctgcagagtgagaagggatggagtgtcagaaacagactcagtcacaaccacacctgtttgcaaccctatgtctgtgatgcagcagaaatgacagtgatgggggtaccaggggaaggaaggggtcaccagggtaatgtgcagatccggatgatggagttagggtgaggggttgtgaagtccagcctccatgcttctcatgaagcctttcctccactgtgcagaattcacctggaatgagtgaatttttctcacttgtgcgatattttaaaaatgggaattcttaaggcaaaacagccagccctggaaaaaaaattctctcattctcttccagaggttctgggagaccatagaccttgatcctcaacaggacctggggagagaggtatagagagtctctgtgtcatcctgactccatccaggccccttgcctttgccaggtgagggccattcatactccatctctcacacacctgggctccatccacactctctcatttttctctgggtgtccatgtgcaataaaatctcagagactcagattctgggagaaaggtgagattcctaagtctagcgcttgatttgtgtgctacttagctcaaaacctgcatgaagacagggacaggggcaggtgatcagacttcagctacaacgcagtcttcacttggggtggaggactcaggacccctcctcaagttctctttttgttataacagaaaacatccttaaaatctgtataggaatttaaagaagaaatgaattcaaatccctctccctccctcctttctttttattttactcttcagttttattgactgtgaatttaaactatttttgaaaacttcatccaagttaacaaaaaatgtatattatgataaattcatgattaaactagcactcatttagccaccacaattgtactcgtggcttgttgctaacacacatggactcctatgtgtcccttccctatcacgtgaccttcttgcccctactggcaaccatgctcctgcctttcttttttgctttgctttcgtcttattactttgtttaattttgcctgtaggtgtttatcttggattttttttattgggtcatgcatcttttctaaaacatttctgtttttaggattcatctatgttgccgtgtggagctatagatccttccttttcacttatctccactctggagttttataaattggccaagacatactcagcagtttactcttgatagatattgaatgacttctagcttgaggctattgaaacattgccttctctgcaaaattatcctgatctcctcgtgccgataatttcttatttcaaggagagtggccaaaaagccaattgaatccctgaaatgtcaagaaagtgtctgcctttctgactggtgaatagaaataaattgtccaaaataaacacagagacctactgggaagacagggatcaagacactctgaggattaaagtctttaaagcatttcagatggagggggctggcccagaattctccccaaatgagacactccagggagaacatttactctcgataaggctggggcatccggaggggttttctgagatcaatggttaggatttactgggtgaggggaggcagtggaaatggaggtgtcctaaccttgtgtctgtgggtggagatgaatgaggcctacaggagagaccatcagtgagagctgtcattgtgtgccctgatcaaagggtttgccttctatccgtctatgaccaagatttacactctgtaaagtagtatctccccttttcactgtttgagcctacagcttcttctctgtgagtgactttttcctttctcggtttgcaaagaggatgggagaagggcatggtcacccatgagcattctttaaatgaacaaatcagatttctgcatttgggctctacctttcgagaaatggtgttgtataccccttgttcctgaactgaggggacgagcatatgagtttctttctctggagattttcttcttggcatttttcctagtaaagtgaagggacatatgagatttggagttcaggtagggtaatgggagcccccaagtgttcttactcctctgttttcagtgtaaagagtgaggttcctactcagttctgctcagctcagacccagccccacccaccctgtcatggatcagttattcaagcccccaatcccattgcttacacctcagtgactcatatgaaattgggtagggttggttcagagtgtctgacatatagtcgatgctatagaaggatgtggttgctaatgccttctcagacatttcagtggccttttcacttactttttgtgtctcaggaagatttatcctccttgacttgttcacaccatctataaaatcccccaagccctcttgatgatgaccactttttctccccatgaaagcaagaaccaaattctgtgaagtttgattaagttttaatgagcaggagtaaggattgaagtgagaaaagatcatgctgttagctggctttggaatcccaagttcacgtagagacagggattccttggcaacatgaagtctggttatctctttaaatagctgacattaaatttggtcagggagatatctctccacacttgcaccatcttcacagcctcaggcttgattctatggtcaaaggtgtaagaggattggccattgaccattacctacagaaggaaaaaaatacatcagaaagacagtatttcaccaaacaagctttcagcctgctctctatggtgtcatagtacctgaaacatccaaccagaaaatgcctcattatatatctgaacccagtagacacacttcttttttacagactacctgttgtaactatctgagacagttgctcactgtattttcaatgtttcctctcatttctccagtgaggctctgtcactctctgtcacatgggccatatttgctcagcctcccctctatcctggaagatctccaaggccagggactgtgtttcataaacttgaatccctgcatcttgcacagggccagccacagggtaagtgctcaacaatgtccactgaatgcacacatttcagttacataaattatgactgctatttgctgctgatgacccagtttctctctggaattgctcatatttgagctagtggcggcaaggaatgtaactcaagtgttcttagagaggtggggctggattaatgttacaaaacataggatattatctttatttatttttttatggttattaaattatttatttattatttattttttttattatactttaagttttagggtacatgtgcacattgtgcaggttagttacatatgtatacatgtgccatgctggtgctctgcacccactaactcgtcatctagcattaggtatatctcccaatgctatccctcccccctccccccaccccacaacagtccccagagtgtgatattccccttcctgtgtccatgtgatctcattgttcaattcccacctatgagtgagaatatgcggtgtttggtttttttgttcttgcgatagtttactgagaatgatgatttccaatttcatccatgtccctacaaaggacgtgaactcatcattttttatggctgcatagtattccatggtgtatatgtgccacattttcttaatccagtctatcattgttggacatttgggttggttccaagtctttgctactgtgaataatgccgcaataaacatacgtgtgcatgtgtctttatagcagcatgatttatagtcgtttgggtatatacccagtaatgggatggctgggtcaaatggtatttctagttctagatccctgaggaatcgccacactgacttccacaatggttgaactagtttacagtcccaccaacagtgtaaaagtgttcctgtttctccacatcctctccagcacctgttgtttcctgactttttaatgattgccattctaactggtgtgagacggtaaacgttagacctaaaaccataaaaaccctagaagaaaacctaggcattaccattcaggacataggcctgggcaaggacttcatgtccaaaacaccaaaagcaatggcaacaaaagacaaaattgacaaatgggatctaattaaactaaagagcttctgcacagcaaaagaaactaccatcagagtgaacaggcaacctacaaaatgggagaaaattttcgcaacctactcatctgacaaagggctaatatccagaatctacaatgaactcaaacaaatgtacaagaaaaaaacaaacaaccccatcaaaaagtgggcgaacgacatgaacagacacttctcaaaagaagacatttatgcagccaaaaaacacatgaaaaaatgctcatcatcactggccatcagagaaatgcaaatcaaaaccactatgaggatattatctttaacagcgtataaacatagaaaaacacctctgactttaatctgaataaaatgtgaatgttttggcctacccatttgaaatgtcagaaactttgatcacattctttattactgaggctacacagggagtcatattttaggtttcattctcaaatttaaaatccatacaactttgaaccagttattccttttctttataatcatgttccaatataaatagggaaaagttggcaatgaaaaaagggttgattagaaagcttaatacagtaacatttgtgagagcaaaacattggaaaccaactcagtgctcttgtaaagggtcaagtacagcaagttgaggaaatccttctaggggaatattatgtaatccttaaaaaaatgaggcagcaccatggatagattatttctccaatatatattctttgagtacaactcaactgtcattcctaaagtgtaatgtgtagggacattgataccagcatttgtttaaaaacaaataaaagtgtatatatgggtgtatgtatatgcttctataaggatagactatggaagaagagtagagaagctagtaatattgttctgaggattgggattgaggagtgagaagtcttcatattggactgactaaaacaattttattcatgtgtatatcttatccatttagctacatgaaaatttaaataacatcataaggggaagatagaggatattctccatttggggaaaatggcaagtgaaccgacattgaccctggtcaggtatgggaaaagagctgaggatggcagtgcaaggagaggtgatggcagagcaagcaacaacacctgttgaatgagagagggaaatgataaaagtaaagggaacccctgtgtgtgtgataaaaagcctgggacagggggagttatgggtgatgaaaagcctgggataaggggagttgtgggtgatgaaaagccggggacagagggagttatctggagttagggcatgaagagctgcctcctgctctgagatcccatggaagccgggtgcggggagctcctggggtgctcacctggtacttatctggcagcactgagatgctcagttcaaattcttggccatcctgaaagggcatattcttggattccacctgctgcttccaggccccatactcacggctgttcatgaccacacgacgaccaaagcacacttggaaatggaagacaatgtctgattcctccttcatctcagtgtggaaatccacctgcagatatggttcattcctgagggcagagcacacagtgttgagcaggtccctttcttgtggggcacacacaagacacacacacaagtctctttgccccttccgtggtcgagcaaagacttgttggtattctaggccttgtcattgtggggctgcttcagctccttgtgttctccatgggtggaaagagatgctccagccctcatccacagatggaaactgagccatagtcactgacttggtcatatgaattgcccattttctgaatattctatgccttttaatagataaagtgtcacagccccaagccttgagtgtcctttactcctagacccatgactagcccccagtgcagctgctgtaggttttgttcctggtgctggagggtctccaggacctgcacattcatggcacttccatcctgccaactagactttccacatgattcacacatgaggtcacccccttagaaaatattcttcctcttctccacctcccatctttgcaccatggagtactcacaagaaacaggcaagtggtcgccctttgattgtcacagtagaaccagtagacaaagaggcagcctctgtgtatggcacctgccaggggattgagagtgggtgagagaggcagggccaggtgtggcctcccctcctgtaacagattcccatggtgcagccagttagagatcaagcagtagactcaggcctccctgctcccaccctacctcagtcaggaccccgtatttttcaaaacaatggggcccatggttaagagcagagcttcagaaactgagctacctcaattagatcctttattgtgctgactactagcagtgagatgttaacatgttttgaaccttttttttagacagggtctaattgaatcacccaggctgtagtgaactggcacaatcacagcccacttcaacctcaacctcccaggctcaagccatcctctcaattcagtttcttgagtagctgagactattggtccacacccagctaattttatacgtatttggagagttggggtttcacgatgttgcccaggctggtctggagcatctaggctcaagggatcctcttgtctcagcctcccaaactcctagattacaggggtgagccactttgcccaaccagcaaggggaccttagatctattgcttaaactctccctgcctcagttttcccaatacaaagatgataatccgaaatacctactttgtatcatgttttcagttatacagtagttaatagatgtaaaccctttagcctaaaccctggcacgtatagggcctgttgggggtcctctatctgaacaaggagggtccttgtggaacactgacctgcgatcatcttcaactctgaaactgtgaaaacaagatgtgaggatgtaacagtagagagattcactccagtaagaaacaacaactttgggttagtttcaatttgagaacagctacaaataatgacactataaacatttctgtataggattttccataaactaaagtgtttacttggctaaaatctggtgagtaaagtgtttctgtttgtttggtgattttatgtttaattttatgggaataccaaacgattttccaatgtagctgtatcattttacatccctccaagcatcgtttgactgtttcaggtactctgcatcttttctaacttgagattgtgagttttattttttattatcattttaaccaccaaaaaaaaaaagaaagaaagaaacaacacttgttgaaagagagagggaaacgaacaggaaagaacaggaaacccctgtgcgtgggaggcacatacatcacaatcatcatgggcaatggacgtccttcccagaaggggcacacattgctgagagcacaaccgcagtacttgcacaaatgaagattgtgggtcagggaagttattggctagaatctataaatggatggtatttttcttttttgaaacagggtcacactgtcacctaggctggaatgcagtggcaccatcaaaactcactgcaggctgggcgtggtggctcacgcctgtaatctcagcactttgggaggccaaggtgggtgcatcacttgaggtcaggagttcgagaccagcctggccaacatggagaaaccccatctctactgaaaatacaaaaattagccaggagtggtggcacaagcctgtaatcccagctactcgggaagctgaggtatgagaatcgcttgaacccgggaggtggaggttgcagtgagccgagattgcaccactgcactccagcctgggaaacagagcgagactctgtctcaaaaaaaaaaaaaaaaaattactgcaggtttgaaggcctgggcttcagtgaacctcttgcatatgccccccagcagctggaactacggtatgcaacaccacattcaataaatttttaaatttttggaaagatgaaatcttgctatgtctcccaggctggtctaccagtcctggcctgacatgggcctttcaattcggccacccaaagtgctgagactacaggcctcagcaaacatcttgatgaatatccactgtaagctctgccttgtaccttcctggttttgggtgattcagtctcttaaatcaagtccctcaatgtccttctctagcatcctggcactcaatgggaaggccaggctagggtaggagacagggagagacctgaggctggaggcaggagccagtggtcactgtgtgcagattccacctaaggaaccatcagccccatcgtctgtttctcacccccattctgcttgggaaaaggcacctgagaattcatgcattctgctctcataaatgctcagagataagtcctcggtaactcaagggccccaagatcccacaagttctgtcaccggggatccacagtgatgcacaagggaagttagacagagtactgctatgtggggaggaaccttcacatgcacagaaggccacatgcatgttcccagttcaacacccagtcacattccagcacacacactcacagtcacacagagccgtgccactcactgagtcacacacacctgctcactgtgcatataaagatgctcatgcactggtccggctgtgctcacacacacactcacatcacagtcatgaagacaaaacacagtcacctgattacaatcacttacacacccacccatatcctggagggccatacacatcccgtctaaagtcacatcatttttagcagagtttactctcatcagataccatcacatgctcacagagggtcacaatgttccagcatccacaccccctacccccctaccccaggagcatctcagataccatagccctagggtctctcttccacacacccacaactctcagtaaagcattcacagtagaaattttcatattttcatcccataaaatctccctcttcccttttctgtgtgacctgagattattgaaggctgtgcctttttaactcacgggtagcagggacattgttgtctccttctgggtggctcttctgaattgtgtccagacttctgtgtgaatctctgagctgcagaatttaaatggcccctatcagccctgcctctggctttattcctgattccaagcccctcccaggaaggtttcctcacacagtgagaaggggtggggtgtcagaaacagactcagtcacaaccacacctgtttggaggcctgtgcctgtgatgcagcagaaacgacagtgagggaggtactggaggaggaaggggtcaccagggaaatgcacagataaagacgatggagtgaggatgagtggtgtgagttccagcctccatgcttctcatgaagccttttctccactgtgcagaatctaccaggaaggtgtgcgttctcctaacctgtgcaatggtaaaaagctggagatcctgggggcaaggcacttggctttgaaagaaaatcctcctcctccttctccagtggttctgggagagcatagatcttgatcattcgcaggacctggggacagaagtagagaaaacacttgtgtcttctttacccaccctcagatcccttggctctgccaggtgagagccactcccactctgtctctcagacacctgggctttaggtacgccctcttatttccctatttcttttcatgtgaatcaaaatctgaggctgtcgttctcctgcagattcttggagaaaggtgagatttctcactcataagtgggagctaagcgatgaggatgcattagcattaatattagttgtgcttgacccgacaataaattccactttccctgatctaaaaccttgacaattcatttccaagcatgcactccaagattctgctcatataaatcagcacaatcacacagttcttttggtatataacgtatttccttaagattaatttgtaatgtcatcccactgcattccttgggttttgactctgggtatggacatggaagcaatgaaaagggtcagaggccacaattaaggagctttggaaaccccgttctaggcaaccaccctcacaccctgcccagaactgtagcttgtaagaaattaccacagaagggaaagaggaactgcttttccttgcaacagatatgcaatagaattttgagtaatatcccagctattcatctgaactggggaagaaatatcagttcagggcgtctggccacctagtaagctgtggataaagatgttgatgttatttacttctcaggcattccagcaatcctttcagtgatgcagagagattgatcttctttaacttccatatcctctgcacaatagcccatacttctgctggttgcaactatttcttcagaaatccattatgccctacgacttgctttcagtctttcttttcaactacatctttccaagcacacactgttcccccgaaaaactttaggttttgtgtatgaaattatataatatctgggatttgctctaaaataatctggggatgacagttctctccttttgcaaacatttgaaattttttacagtacagtttttaattaagtagccagtacatagactatatataaaagaaaaacaaaattatcagtactggcatggctatatcttcaagaaatgctgtagtatgaaaaggcatgaagaaaacatgcataatacgagaccaattattttaacgacaaaaaaataaaattgatctcataagtacacacaaacattcataaatgcactagaaaatgtcaaaagaaggcattccttgtagggggggacactgggtttagaagaaatgaggtcaaggtataaatctgtaatgtttgaattttacccacaagaaggtattatattacttaaatgatttgtataaacattttaaaaataaaggtcataatacagttaaaatttttaaaaaatttaatcacagtttggaacccagcaaccatgcttcttgttacagagcactctttctattttgtgttctgtttttcctgttcctccagcgatgttctaacactctatacagcaaggtgggtttgctcagtcacctctctatcctggaacatccctgcaccacataaattgcctgtcacaaggtaagtgctcaataaatattcattgaatgcataactttcagtgccatggttttatgccatgtagtgataaccggtgttttcttttaagaagatccgcatttattccctttctccttccctccctcccttcctttcttttatacagaaacatcagtgtgattcctggcctttgtctttccatcacactcttcacatgactgacaggacaaccccatgcctctactctcacagaatagccatagcatggccacttctcattgtctgccagttcactgacagcagctttgtgtttactactaagtgtctggctcacagcagatgctcgataactccatttctaagaaataaatatctcttcctgtaacttcttcctgcaattcaaaccagagagtatttctcaggaattatcagttgattgagtggcaaggtatgtctggactatgcatttcatttgaatctattaatagttttatggctagaagagaaaatgaaacaaaaatggattttcagctgggtggaaaagttcagtcagtagaacaagtgagggaacattctggggaacagatgcagagtgtgggcaggctgtcattatgagtgtgacagtgtttaccagctgagctgacctttgttctgatgaaaatcttgtaattcactatccaaatatcaattatatctttgacatacaaaaaaaaccatcgtatcattcttatgcctttgcatcctcatagcttagctcccacttatgaatgataacatacaatgtttggttttccattcctgagttacttcacttagaataatggtctccaattttatccgggttgctgcgaatgccaatagtttgttcctttttatggctgagtagtattccatggtatacatatacaccacaatttctttatccactcgttgattgatgggcatttgagctggttttatatattttccaattgcaaattgtgctgccataaacgttgtgtgcaagtatctttttaaaataatgacttattttcctcggggtagatacccagtagtgggattgctggatcaaatggtagttctacttttagtttcctgaaggactctccacactgttttccatagtgtttgtactagtttacattcccaccagcagtgtaaaagtgttcccttttcaacgcatccccaccaacatctactatttatttatttatttttttattttggccattcttgcgggagtaaggtggtattgcattgtggttttgatttgcatttctctggtcgttagtgatgttgagcattttttcatgtgtttgttggccatttgtttatcttcttttgagaattttctgttcaggtccttggcccactttttgataggactgtttggtttattcatgatcatttgtttgagttccttgtagattctggatattagttctttgttggatgtaaaggttgcaaagattttctgccactctgtgagttgtgtgtttactctcctgattgtttcttctgctgtgcagaagctttttagtttaattaagtcccatctatttatctttttgcttttgttgcatttattttagagttattggtcatgaggcctttgcctaagccaatgtccagaaaggtttttctgatgttatcttctagaatttttatagtttcaggtcttagatttaagtccttcatccaccttgagctgatttttctatgagttgggagatgaggatccagtttcattcttctacatgtggcttgccaattatcccagcaccatttgttgaatagggtgtcctttccccactttatatttttgtttactttgtcaaagatcagctggcagtaactatttgactttatttctggggtttctattctgttctattggtctatgtgcctatctttgtaccagtaccatattgttttggtgactatgaccttatattaacagtatagcttgaagtcaggcaatgcgatgcctccagatttgctctttttgctgagtcttgctttggtatgtatactcttttttggttccatatgaattttaggattgtttttcctagttctgtgaagaatgatggtggtattttgatgggaattgcattgaatttgtagattgcttttggcagtatggtcattttcataatgttgaaattttcacatgggatgctagagcatgggatgtgtttccatttgtttgtgtcatcaacaatctctttcagcagtgttttgtagttttccttgcagaggtctgtcacctccttggtgaggtatattcctaagtattttatttattttatttttgtggctattgtaaaaggggttgagttcttgatttgtttctcagttagttgctgttggtgtatagcagaactactagtttgtgaacattaattttgtctcctgaaattttgctgaatttatttttcagttctaggagctttttggaggagtctttaaagttttctaggtatacaatcttagcatcagcaaacagcgacagtttgacttcgtctttactgatttggatgccctttatttctttctcttgtctgattgttctggctagggcttccagttctatgttgaatagaagtggtgagagtgggcaccattgtcttgttccagttctcagagggaatgctttcaactttttcccgttcagtattatattggctgtgggtttgtcatagatggcttttattactttaaggtatgtctcttctatgactattatgctgagggttgtaatcataaaggggtgccggattttgtcaaatgctttttctgcatctattgagatgataatctgatttttgtttatgtggcatatctgtttatgtggcatctaattctgtttatgtggcatatcacatttattgatttgtgtatgttaaaccatgattgcgttttttggcatgcagggatgcagtgggtttcacctgattgtggtggattacctttctgataagctgttggatttggttagctagtattttgttaagaatttttgcatgtatattcatcagtgatattggtctgtacttttctttttttgttgtgtcctttcttggttttggtattagggtgatactggcttcacagaatgatttagggaggatttcctcctatcttatcaatacaatttgtaccaattcttctttgaatgtctgatagaattcagctgtgaatccgtctggtcctggacttttttgttggcaattttaaaattaggatttcaatcttgctgcttgttattggtcttttcagagtttctaattcttcctggtttaatctaggaaggttgtatatttccaggaatttgtccatctcctctaggttttctagtttacgcacagaaaggtgttcatggcagccttgagtgatctttttgtatttctgtcatactggtcaaaatatctcccatcttatttctaattgagcttatttgggtcttctctcttcttttttggttaatatcactaatggtccattaattttatttatcttttcgaagaatcagcttttggtctcatttaccttttgtatttttttttgtttgtttcaatttcatttagttctgctctgatcttggttatttcttttcttctgctgggtttggctttggtttgttcttgtttctctagttccttgagatgtgaccttagattgtctatttgtgctccttcagactctttgatgcagacatttaaggctatgaactttcctcttagcactgcctttgctgtatcccagaggtttctatatgtttttgatatgttgtgtcactattatcattccattcaaagaattttttaatttccatcttgatttcattcttgtcccaacagtcattcaggagcagggtatttaatttccatgtatttgcatggttttgagggctccttttggagttgattttcaattttattccactgtgttctgaaagagtacttgatagaatttcaattttcttaaatttattgagacttgttttgtggcctatcatatggtctatcttggagaatgtttcatctgctgacaaatagaatgtatattctgcagctgttgggtagaatgttcaaatatctggtaagtccaagctatagttcaaatccattgttctatcggccactgaaaatatacatacacatttattattgcaatagcaaaatgctataagctgggttgaccctataaaatcttccttttctgggaaaaaatccattaataatttcaaataacaaaataaaaatggacggacagttaataaaactataacaagagaatcttggtagtcattttttcttcttctcttccaatcacattaaatcttcaatccaagatatacagtttgctcttcctttaaaacttattaatattctgaccaattctaccagctctacttccacagtgccaaccaaacaggatcaaatgcatctaatggttttttttaaagggagtagtttgactgccaggacctactgaggccaacaatattaagaaagcttctgaaaatactgtaaaagaattttctttaaatagtgaaccaaaaaagcccttccatttgtgtagttgctttgacaaaactgcaaactcaccatcaattaaaactgtaaatatggcaataaaggtaagtccatcttttcgtcttattcttctgttagctgtgactccatttcttcgcttcctcttgccgcaaatctccttgaaagaagtgcctattccttaagcattactactaataaaatatcaaaaaacaacagatgttggcatggatgcaaagaaaagggaatgctaatacactgttggtgggaacgtaactggttctacctctatggaaaacagtatggcaatatctctacgaattaaaaaaagacctaccattccacccagtaatcccaatactgggtatatacatcccaaaaaagaaataattatatgaaaagacaccttaactcttatgtttattgcagcactattcacaataggaaagtcacagaatcaaagtaagtgtccatcaacagttgattgaataaagaaaatgtgctacatatacaccagggaatactaagtagccataaaaagaatgaaattctgtcctttgcagtgacatggttggagctggagactattatcctatgtgaactaactcagaagcagaaaatcaaatactgcatgttctcacttacaagtgggaggtaaacgatgggttcatatggacataaaaatagaaataacagaccctgggggcttgaaaatggggcagagagaggaggaagtgagggttgaaagattacctattgaacacaatgttcagtatttgagtgatgggtacaccagaagcccaagccttaccattatgcaatacactcaggaaaaaaacacgcacatgtgtccccaaatctaaaattaaaaaaaaaaatttaaccctctttatggagggttcaaaggataaaataaagtataactatacaagctttcatataataatagatgaaaacatatatatattgattactcaaaaggaaaaaagaacaacatagtcttactttcttctaatatctttattcatctcccctcaaactcagtctgaatggccttctatccttccacctcatagaaatgattctgttaaaggcattaatggcctgcatattgctaaacacagtggtcagcggtcaggcctcatcttacttaacctgccaggtgattattccttcctccttgataaactttcttcacttagctaccaggacactgaactatcttggtttcttctcatctcactgtttgctccatctcagtgtcccttactgcttcctctttttctcctgacttctttatcttggatcgacccaatgctgtttctcttcctttttttagctgtacttacgcccttggtgatggcaatctctcaaatttgaaatgttatctatttgttacaaccctccaatttgtatccccaatccaaacctctctactaaactctaaacccatatattcaactctctgcacttggacataaaaaagcatctcaagttcaagattcccaaagctgagcttctgatatccttcccccttaaacgtgctccatccacagctttgccaatctcagttgatggcttcttcaacagtgcagtgccttgggccaaatcctggtagttactctcaattcttccccttttatcacatcccacatccaatccaccaggaaatacagtttgcacttttttttaaaacatatcaatattctgaccaattctaccagatccacttctatgatgccaaaaaatcaggattaaatacatctaatggttgttttcagagagagatgtttgtttgtcaggacccattgaaaaagaaatgccactgatgtattttctgggagccagtatttctttcctgatggctgccataaggacccttctattgttctacactccagggaacataatgcaatcaatgtgtgcataagtaaacctaagacacaggtgaagatgtaaagatgattttgttagtttgaaagccaattacgaaggcagaggagcaagatggtggaatagaaggctccactgatcatcccccatgaaaggacaagaggataacaagtacctgcctggaaaaaacaccttcataagaaccaaaaccaggtgagcactcatagtacctggttttaacttcatatcgctgaaagaagcactgaaaatatagcaaaaacagccctgaatcaggggcatcatctccgcccaccaccaccagcccccccaaacacactccctggcagcaacagcgtggtacagagggcatctctgggcggtggcagaggaagaacagcaattgtgaggcaatggactcagtgctgtcctgctagactagaaagaagaactggaccaaactcggctgatgcctgctctgaaaggtaagctccaggccaggcaacatccactacaagctgacttaagggcttttgggtcctaagggaacatcagtggtagactggcagtactcctcatggcctggggaggcaatagctacagaatcaggcttctctgcctttggaaaggggacagaagagtgggaaggactgtgtcatgtagtttgagtgccacctcagccacaatataatagaacactaggtagacttctaaggtttttgagtccagtccctgactcccagatggcacttctggacccacctggggcctgggagatctccctgatcttatgggaaaaacacaggcctggctggctttgccacttgctgatattagagccccagggccttgagcaaacataggcagcagcctggcagttgttacagcagatgtgggtggagactcagtgctgtgctgccatcaggtatgacccagcacacttatagtggtggtggccacaggggtgtctgtgatacgtttccctcagctccaggcagctcagcacggagaggctctgtatgtttgggagaaatttagggaagagaacagagtctctgcctggtaatccagagaactctcctggatcttgtccaagatcatcaaggccatacctccaacagtctgtaaggacacaaatctccttgaaagaagtgcctatcatgtacgtttattgcggcactattcacaatagcaaagacttggaaccaacccaaatgtccatcaataatagactggattaagcaaatgtgggacctatacaccatggaatactatgtggccgtaaaaaaggatgagttcatgtcctttccagggacatggatgaagctggaaaccatcattctcagcaaactgtcacaataacagaaaaccaaacagcacatgttctcactcataagtgggagttgaacaaacaaaacacatggacatagggaggggaacatcacacactgcggcctgtcggggagtgggggactatgggaaggatagcattaggagaaatacctaatgtaggtgatggtttgatgggtgcagcaaaccaccatggcacgagtatacctatgtaataaaactgcacgttctgcaaatgtaccccagaagttaaagtataataataacaaaaaagaaagaagtgcctatttcttgagtattatcatgttattaggcttggggcatccagtgaagtatatacagcttaggtcaccacacccaagtcctttcaaatatctggaaagccttcccaggaaggatggctacaaataagcacagccagtgaaaactacaataaacacctaaccctccaatgcatagacaccaaataacatctgctagcattaacaccaaccaggaaaacatgacctcacaaaatgaactaaataagggagcagggaccagtcttggagaaacacagatatgtgacccttcacacagagaattcaaaatagctgtgttgaggaaactcaaagaaattcaagataacataagaggaattcagaattctatcagatgtatttaacaaagagattgaaataaaaagaaagccaattaaactgctccattgacatgtttccagattcagggtctataaaccacttttttcaatgattgtatgaagcagaaagttgatgtcaaggtgaccagcagcgacacccaggtaccacatcgagggctttgaattaactttcagcagagtcaatcccagtgctgtcaagcaaataaaaatagagtgaggccaacaatctcaagaatacttctgaaaatgttggaaagaattttctttaaatagtgaataacaacaagaaaaaccttccatttgtggagttgcttcaataaaactgcaaccccaccatcaattaaaagtttaaggccacaacaataaagaaatgtccatctcttgatctcattcttctgctagctgtggcctcatttctttgcctcctcttgccacaaatctccctgaaagaagtgcctatcctttgggtaatattcaagagtcaaaaaacaacagatgttggcatggatgcagagaaaagggaatgcttgtacactgttcgtgggaaggtatatttgttctacctcgatggaaaacagtgtggagatatttcaagggatcaaaaataaagctacattttgactcagcaatcccactattgagcacctacctaaaggaaaaaaatgattatataaaaaagacacctggactcttatgtttattacagcactattcacaatagcaaattcatgggaccaacctaagtgtccatcaacagttgactggataaagaaaatgtgctacatatacattgtagaacactatgtagccataaaaagaataaaatcttgtccttggcagcaacatggatgaagctggagtctattatcctaagtgaactaactcggaagcagaaaatcaaatactgtatgttctcacttatacgtgagaggtgaatgatgggtacgcatgaacataaaaatggaaataatagacactggggactccaagaggtgcaaagagatgggggagtgaggatcaaaagactgcttattgaacacaatgttcagtatttgggtgatgggtaccccagaagcccaatccctgccattatgcagtacacccatgtaacaaacatgcacatgtaccccctgaatgtaaaatgtttgaaaaaaaaaaaagaatcttgaccttctttatgcagggtttagaggataaaatcattaaagaatatgcaagctttcttatagtaatagatgataaaatcatatcgattactcgaaaggaaaaaactgcctattcttactttgttatattttcttcattcatttcttttttttattatactttaagttttagggtacatatgcacaggcaacctacagaatgggagaaaatttttgcaatctactcatctgacaaagggctaatatccagaatctacaatgaactcaaacaaatttacaagaaaaaacaaacaaccccatcaaaaagtggcgaaggatatgaacagacacttctcaaaagaagatatttatgcagccattcatttctttttaaactcagtctgaaatggccttctctccttccacctcatagaaatgatttctataaaagtcgttaatggcctgcgcattgctaaacataatggtcggttatcagtcctcatcttacttaacctgccagttgattattctttccccttgataaactttcttcacttagccaccagcacgctggaatctcttggtttcttgctccatctcagtgtcctctactgcttcctccttttctcttgacctctttatcttggattgaccgatgctgttccccttctctttttaagctgcacttactcccttgataatctcaacctctcaagtttgaaatgttatctgttacaggccccaatttacatccccaatttagacctatctactaaactctaaactcatatagtaaactgtctgcacgtggtcatacaacaggcaagtcaaattcaagattcccgaagctgatctcctaatagtcttctcctttaatgtgttccatccacagctttgccgatctcagtttatgaattctttgctcctccagagtcttgggcaaaaatcttggtagtcattctttattctctttttatcacaacccacaaccaattcaccaagaaatatagtttgctcttcctttaaaatatatcagtattctgatcaattctaccatggtccacttccaggatgccaacaaaacaggattaaatacatctaatggttgttttcagaaagagtcgtttgttttctgggacccactgaagaaatgccactgatgtaccttctgggggccagtatttcttacccgatttctgctgtaaggactctcctattattctccactccagggagcatcacacaattggtgtgtgcataagtaaacctaagatacaggtggaaatgtaaatataattttgctagtttgaaagccaattacgaaggcagaggagcaagatggtggaatagaaggctccactgatcatacccctgcaaagataccaggttaacaagaatctaaccaggaaaaaaaaaaaaaacaccctcagaagaaccaaaaatcaggtgagcactcgtaggccctggttttaactatatattgctgaaagaggcactgaagagagaaaaaacagccctgaatctcaggcaccacctcccccggcactccctggcagcagcagagtggtacagagatcttctctgggagctgggagaggaagaacagagcagtcgtgaagcactgaactcagtgctgtccgttagagcagaaagtaaaactggaccaaattcagctgatgcctgctcatggaggaagcatttacactagcgctagccagaggggaatcacagatcccagtgatcttgaacttgagtgaacttgagtgtctgcgaatctcaccactgagagctacagcattctgtgtctccaagtaacctggaaaagcagtctaggctgtaaggactgcaactcttaggctagccctagtgctgaactagggccagaaatagcggacttgggatgcacatgacatacaaaaacaccagcttgggcagccaagggagtactggcatctcctccccaactccaagctgcacagctcacagctccaaaacagacccctttctttcacttaaagagaggagagggaagagtgggaaaagctttgccttgcatctaggatatcagctcagccacagcaggataggacattggttggagtcatgaggcccccgttccaggccctagctcccagatggcatttctagacacaccctgagccagaaggaaacttgctgtcttcaaggaaaggacccattcctggaagcattcatcacctgctaactgaatagctatttatcaccttggaccccaaataaccagcagtgatacccaggtactacgttgagggccttgggtgagcctctgagacctgtgacttcagaagagactcagcacattcctgtctgtggctgttatgaggcaaggctcctgcttgagtaaagcagagggaaaagcaagggggacttggtcttgcaccttaggtaccagcatgaccacagggagtagagcaccaatcggggtcttagagtcattgactcggacttgactcttgaacagcaattctgaaccagccctgggccagaagagagcccactgccctggagggtgagccccaggccaggcagcattcactacaagctgacctaggagctgttgagccctaagagaatatcagagggagtctggcagtattccttgtggcctagagtggcagtggctatggggtgaccactgcctttggaaagagcaaggaagagtgggaaggactatgccttgtggtctgagtgccagctcagccacaatacaatagaacaccaggtaggcttctaaggtccttgactccagtccctgactcctggatggcacttctggacccacctagggcctgggggatatttgccacctgctgatattgagccccaggttcttgagcaaacataggcagcagccaggcagtggttacagaaagcctttgaggagaccaagtactgtgctggcttcaggtctgacccagaacagtcatagtggtggtgaccacaatggtgtttgtgtcaccttttccacagctccaggcagcccagcacagagagactctgtgtgtttggtagaagttaagggacaagaacaagagtctctgcctcataactcagagaattctcctggatcttgtccaagaccatcaatgcagtacctctaagagtctgcaagaagcatcatgttactggacttggggtatcctctaaagcagatacagcttaggtcaccacacccaagttatttcaaatatccagaaagccttcccaagaagaatggctacaaataagcccagacagtgaagattacaacaaatacctaatcctccaattcctagacactgaagaacatctattagcatcaacaccatccagaaaaacatgacctcaccagatgaactaaataagtcaccagggaccaatcttggagaaacagagggatgtgacctttcaggcagagaaaaatagctgtgttgaggaaactcaaagaaattcaagataacacaaagatggaattcagaatgctttcaagtgtatttaacaaagaaattgaaataattaaaaagaaagacagttaaacttctccactgacatttttccagattcagggtctataagccacttctttcaattcttgtctgaagcagaaagtcgatttaaggatattagcaaataaaaatatagtgaggccaacaatcttaagaatgcttctcaaaaaatggtgaaaaatttttcttcaaatagtgaacaaaaaataaaagcctttctatttgtgcagctgcttcaataaaactgcaacttctccgtcaattaaaacttttaatccagacaatagagagaagtccatcttttgatctcattcttctgctagctgtgattccatttctttgtttcctcttgggtgttattaataaaatgtcaaaaaaacaacagatgttggcatggatgcagagaaaagggaatgcttgtacactgttcatgggaaggtagattggttctacctctacgaaaatcagtatgtagatatctcaagggattaaacatagagctccccttcgacccaacaatcctgctactgggtacctacccaaaggaaaagaaacacctgcactcctatgtttatttttatttactttttttttttgagatggagttttgctcttgtcacccaggctggagtgcaatggcacgatctcggctcattgcaacctctgcctcccaggttcaagcgattctcctgcctcagcctcccgagtagagtagctaggattaccggtgcatgccaccacatccagctaatttttctatttttagtagagacagtatttcaccttgttggcccaactggtctcaaactcttgacctcagatgatccacctgtctcagcctcccaaagtactaggattacaggcatgagccacagcgcccggcctgcactcctatgtttattccagcactatccacaatagaaagttcatggaaccaatctaagtgtacattaacagttgattggataaagaaaatatgctacatatggccaggcacagtggctcacacctataatctcaggactttgggaggatcacgagccgggcagataacttgaggtcaggagttcgagaccagcttggccaacatggtgaaacctcgactctacaaaaaatacaaaaattagccgggtgtggtggcacgcacctgtaatcccagcttctcgggaggctgaggcaggagaaccacttgaacccaaaaggcagaggttgcagtgagccgagatcatgccactgtactccagcctgggcaacagggtgaaaaaaaaagaaaagaaaagaaaagaaaatatgctacatacacactgtggaatactatgtagccataaaaagaataaaatcatatcctttacagcaatgtggatgaagctgaaggctattatcctaagataacaaactcagaagcaaaaaaatcaaattctgcatgttctcacttaaaatgagaggtaaacgatggatacatatggacataaaaaatggaaataataaacactggagactccaaaaaagggcagagagaggagggagtgaggattgaaagattacctattgaacacagtgttcagtttttgagtgacaggtacactagaagcccaatccctaccattgtgcaatacccccatgtaacaaacatgcacaggtacccccaaatctaaagtttttgaaaaaaagaatcttgagcatctttgtaaaggatttaaaggataaaataaagaacagccacgcaagttttcttataatagatgaaaaaattatattgattacttaatatgaaaaataaactgcatagtcttactttcttcaatttcttcactcatttgtccttaaactgagtctgaagtggccttctatccttccacctcatagaaatgattctgttaaagtcattaatggcctgcatattgctaaacataatggtcagttatcaggtctcttcttacttaacctgccagttgattatttcttcctgcttgataaactttcttcacttagccaccaggacactgaactctcttagtttcttctcatctcgctgtttgctccatctcaatgtcctttactgcttcctccttttctcttgacttctttatcttgggttgacccaatgccgtttcccttctctttttcagctgtacttactctttggtgatctcagcctctcacgttttaaatgttatctatctgttacaagctccaaatttatatccccaatccagacttctgtaccaaactctaaactcatgtattcaactccctgcacttggacatacaacaggcatctcaaactcaagatttccaaagctgagctcctgatattcttcccccttaaacatgctccatccacagctttgccaatcttaatttatgacttcctcacccgcccagtgtcttgggccaaaatcccggtagtcattcctgattcttctctttttatcacatctcacatctaattcaccaggaaatacagtttgcttttcctgtaaaacatataaatattctgaccaattctaccagctctacttccacaaatctgatctgagttaccattgtcactggaggattactgtcatagccttacaaatactctttcttctgtccatgcctatccgtagtccattctgtacacagcagcaaggcggatccttttaaaatataagcatgatcatatctgtcctctgtccatgcctcccatctttcacttacagccaaattccttaataatggtccataagtttctctgtgatctatttttccatattctcttcaatttcatctcctacctctttccccctctactccagacacagtggcctccttgttgctccttaaaacttctattgacacttcctcataatggtccttgtcagtagctaatatctctgtctggaacctttttctccaaggttcactgactgtttccctgagtcatttgataaagttcaaggcaaatcctacatctccctctgagtgaggaggtcacccgggcacaaatcattgaacacatgtaacagtgaaacagcaaaggaactaccaaaacaaactccacttttgtttaagaggcatttacccattcctgcatgtaagttaagataattttaaagcactgagataaaacacaaaagcaaccatgtagttttttaagtaaactgtacaattaaaggggagatatggaaacaactaactatgttttcctgaagatttatagaagcattgtgacttgaccaaggacaaagaagttcccaatcttctcagagcctcactggtacccagatgtctgcagacttcagtcacctcttgatcccaacccctgagcatagtttcctcatatcgccctcccataagaaccctccagccagcctaagaaacttgagatggtctttgcaaccctagcctgccacctccttgggttgctgcttcccgataaacctgcttctcctcacaccaactctcgtctcttgactttggcttttgagtggcgagcagctgaacctagatttggttacacacatactggcctatagtgcaaaagagaatatgtatatgtttgtcaatgagaatggctggatttgcctaattctctgtttttttgtatttttatttaagtttggaattagttgtatataaaatgtgtgtctgtgcccctgagtgtgtgtgtctggattcagattaatatctccttgtcaggggcatgcctgcgtctcttagctgcaagaggaaaccatgctctgtgtcctgattctacctgggcatcaatgtaggaaacaaagtcttggctttcacctactgatgcatccatctctcccacatctcaacccctgctgactgtctgtttccctgattgtgggtcatatgatgaagatcatgataaatctcatgtccccctctaatggagtagactgcagtttgtgtgtaatggagggtgatgggaaaaggggaagtattagcatgccttgggacccacaatagagacaactcagacttctccagtcaccaaaatgagcagaggtggctgatgtaagagcctgagatacactccaggcaggatttcctttccacatgtgtgtgcctgtgtgtgttggggtgggggcaaactaataaaggtaagtagatgtttgagacagagagagcaagaaggactgtgtttgctctcaggaggttacatttcctatagtaatggctttatggagaaagtcgttttcctgtctctgcagaaggagtccagaattccaggtggatttctgtgaatatcccaaggaaggcgccaccatgacattccacttcccagtgtactcgagcaatgtggtagtgatgaacagcatccagaaagggttatggaatgagaaaaacatgtttctctggctcctttgtgacagggaagtcttttgagctgtgagttttggtgctggacaatcagtaccaggtatgtgggccctaaggggtgaggggcatggacctcagtggctggggtggggctgctgtggaggaactgagtccaaatctgatctggtctcagtagaaaaattggattccatatcctaccatgccctttgctgcacacaagccccagccacaaaagctgacctctggttctggtgctctccttgtcttctccataaaacatgctcattcttgcagatggagctgaaacatcaaaactctgaaccttattggtcactgtctctttctcattgagaaaacacagatcacagacacattccccactgcagtccttcatccctgagggcggaggacatgtctcctgtgcatggcagcagtcttgaccctgaggaaaatattgaagacaactttttaagcactgcagtgtgtgctgtgcaagtacagattcagaggtgaatccaacacatctcctgccctcaaggacagtcaggaatgttgagggaaaattacaggcttgctgtcatcagggtagaccagggatgagaagctctggaagcaaagaagtgggacaatggaggatgatttactgcagccaaggcttggccatgtttcctggagaaggagatatttgagctgttttgttttgagggagaatagaaatttttacaggcaatgagaggaaaggcatttgaggaaagggaaggtggaggtctgaatgttctgagctcacaaacagtacatctctttccccaggtgtttgtgaatgggaagtccacctatatgtttgcccactccctttcaccacagtctgtgaaaatggtgcaggtgaagggagatactttcctgacttcagtggatatattgtaaggggcagagaatcttgcaataaaaatatccacctcattacactcttttataatgtgcatgatcacagcatctcccagaaggtgccagagtgtctcccaatccccacacttaagctaatgatagtaaaatcttcctagtattagccaggacttggctctcgctaataggaaagatcccaagggaagatttggcacatgtggaaattcatcctgggtagggtgtacagagtgtggcttgggaaaggtgcaggtggttaaaatgtcaatggttgcccctgaaatagagacagagccaaagcatctcatgatattatgcagaagatggaagggtgttgggctatggaaggaagaaatatggctttgggcgtgtgactctcttttgagttgtttgttcattcaacacatagttattgaccccttactgtcatatacctctatgtatgccagacattcccatatcactggtgtaaggagctgagaggaccaggaaatgatcctattggcaaaaggaactcgatactgatgagttagggatgaagttgttcttagaggggctccttaactcaggagttaagtgtcagttggtcaggcagatgtaccttgaaccctgatgcatggctttctggaggtctatctcccctccctccactcaggaccactcagggtgcacccaaaagctttcaggggtcacaaagtgtgatccaggagactgggctcagacctttccagacctctctagcctgaggtcctctggagacatacagaaaagccaaaacctgtagacctaattatcctccaagtttctgtggtccctgagtttccacaaactcccagacacttcatgtaaaaagaatggttgcttttgtcatctttaggccctcagagtgttcttccatgattttcctcggaaagttttgttcatgttttttttgtgtttttggttgttgtttgtttgttttgtgttttagagacaagctctttctctgtcacccaggctggcttgcagcagtgtgatcacagctcactgaagcctcgaaccccagggctaaagtgatcctcctgcctcaaccttcttaatagctggtactacaggcacatgtcaccatgcccagctaattttttttatctttgtagagacagtctttctatgttgcccaggctggaatgcactggcaggatcatacctcactgcagactcaaccttctggactcaagcaatccacctacctcagcccttgaaagtgctggtattacaggagtgagccactacgtctggctccccaagaagttttgatattgcttacgtgtctatctattaccacaataataaccatgaaaagatgctgaatcaaaacaaacaaaaatagttcaggttctggagcaagcctggttcaaacctctgctgtcttaattcttagctctgtgaccttgtgcaagtttcttaaactctctatacctcagtttccttttttgaaaaatgaggatagttgtatctatctcatatagttgttgtgagcatcaggtgaatcgatactttttttaaaagatgctgaatcaccagggaaatgcaaatcaaaaccacagtgggatattacctcacatctgttagcatggctattttcgaaagaacaaaagataacaagtgtgggcaatgatgtgaagaaattggaggccttgtgcactgtgggtaggaatgcaaaatggtgcagccactatagaaaacagtatggaacttctgcaaagaattacaaatataactaccatatgacccaggaatcccactcctgggaatatagcaaagaagttgaaatcgggatttcaaaaagatattagcatcccattgttcattgcagcactattcacaatggccaagatatggaaacaacctaaatgactatagacagatgattcaataaaaaaaatgtggtgtatacacacaatggaaaattattcagcctttagaaagaaggatatcctgcaatatgcaaccacatggatgaaccttaaagacattatgctaagcagataagccagccacagaaggacaaatactgcaggattccatttatatgaggtgattgaaatagtcaaaattagagaagcagagagtaaaatcgtggttactgggggtcgggaggaggggtaaatgggatattgctaaccagcggacataaagtttcacttacacaagatgaataagttctagaaattgtctgtacaacactgtgccaatagttaacaacactgtactgcaaacataaaaaatgtgttaagagggtagatgtcatgtcaagcatttttaccacagtaaagtaaaattttgttaaagaatacatgtaaattagtacaaacactatggagaacagtttggtgattcctcaaaaaactaaaaatggaaatccagcaatctcactgctgggtatatatccaaaagaaaggaaatcagtatgttgaagagatatctgcacccccatgtctactgcagcactgttcacatcagccaagatttggaagcaacctcagtgtccagcaacagatgaatagataaagaaaatgtggtgcttatacacaagggagtattattcagccataaaaaagaatgcgatcctgcaatttgtaacaacataaatggaagtgaagttcattacgctaagtgaaataagccaggcaccgaaagacaaccatcacatgttgtcacttgtttgtggatctaaaaatcaaaaacaattgaactcatgaaaatggtgagtacaaggacggtctccagaggctgggaaggatagtagagggctggggatgagagatgcagatggttaatgggtacaaaaaatagttagcatgaatgaataatgcctagtatttgataacacaaccaggtggctatagtcaataactgtacatttaaaaataactaaaagaggccgggcatggtggctcacatctgtaatcccagcactttggaaggccaaggtgggtggatcacttgaggccaggagttcaagactaacctggccagcatggtgaaaccccgtatctaccaaaaaatacaaaaatttcactgggcgtggtggcgcatgtctgtagtcccagctactcagaaaggttgaggcacaagaatcccttgaacctgggaggcagaggttgcagtgagctgagcttgtgccactgcactccagcctgggcaacagagcaagactctgtcaaaaaaaaaaaaaaaaaaaaaaaccctaaactaaaagagtataattggattgttcataacagaaagcataaatgtttgaggggatgtaaaccccaatttctatgatgtgattattatgcattgcatgcctggatcaaaatatctcatgaaccccataaatatatacacctacaatgttcccatataaataaaattaaaaattaaaaacaatacaaaaaaggcatgtgctattctattggtcctggcatactggctttgatagacacatccatcttttctcactggtagtgtcaatcacctacttttatgaaccattcttaaatcaatttgagacagcatcccacattaaattgtacatccaaggagtcaataccagtttcaaaggagatagaaatagaccagatttttcttttttctttttttattttatttatttatttatttatttatttatttatttatttatttattttgagatggcgtctcattctgttgccaagactggagtatagtggcacaatcttggctcactgcaacctctgcctctcaggttcaagtgattctcctgcctcagcctcctgagtatctgggactacaatcatgtgccaccacacctgactaatttttgtatttttaatagagataagttttcaccgtgttggtcgaactggtcttgaactcctgacctcaagtgatccacctgcctcagcctcccgaaatgctgggaatacaggcttgagccaccacgcccagccaatagaccagatttttgaaacatttacatgttaaaaaaagagagagagaaagggagagagcaggatttatatttattcaatgtgagggagagtatgtcaaagattactcccgttcaggaacagctaagtggagagggtttccatattggtacagggaaaaatggaggagaacctgatttgcattaatagtgacaggtgtccagaagaaatgtgagtagtgatgttaaggcagaaattacatgttaatatgtctggagctccagtagaaaaggttgaggtctatggtagagataaacttggcatattcagcacatatcttaaacacgtgcagacttgatatggcctaaaggaaactaacacagatgtggaaacatggggaacccaagactaagcccttcaaaagtctgatccttaagaattgaatagaagaagcatgagaaggctctaggaatgagaaattccatcccccaccccctcccccaccacaacatcaaataacaaccatacttggaacccgcagaatcagtgttgggactcacagcagacagcagcatgacaaggatgcaatgatatttgcagcagggaacatctgggaatacagaaagggccttgcaaaagcagaacccaaaaaatatatacccttagaaggtaaaaaacccaccctcgaggcaactgttaagattgagacaaagaaatgggatggcacagaattgctgagcaccagcagaaaagaggagaaagagcaatatcttttaaattaaacatcagtgtagcaactgaaaaaagaactcttcctcaagataatttattttcatctgatagaaaattgtcataggctgggcatggtggctcacgcttgtcatcccagcactttgggaggccgaggcactcccaaagtggtgggatgagaggcgtgagccaatgggcccagcctattagcatgttttgaaagtatacaatgttatgttactgatgataagtctgtgtcccttcccaatgaggcagttatataggacacaacctaccactacacatacagcctcaaagcactggcccaggctctgcctcaccttacagctgacccatgagggttcatctgacaacttcaggctccagaggcgttgaagaacaacaaattgttgattgtctacacacagagattgttgacggctgttgtgataactcagttcttgtcttcttagtttaaaagaatttaaacaagatgcagaaaaaaaggaatgcttttatgctgttggtgggaatgtaaattagttcaaccattgtggaagacagtgtggcgattcctcaaagatttagaaccagaaatatcattcgacccagcaataccattgctgggtatatacccaaaagaacataaattattcttattataaagatacatgcacacgaatgttcactgcagcactattcacaatagcaaagacatggaatcaacccaaatgcctatcaatgatagactggataaagaaaatgtggtacatatacaccatagaatactatgccaccgtaaaaaggaacgcgatcatgtcctttgcagggacatgcatggaggtagaagccgttatcctcagcaaactaatgcaggaacagaaaacaccgcatgttctcagttataagtgggaggtaaatgatgagaacacacggacacaggggagggaacagcacacactggaacctgtcaggggggcaggggaagggagagcatcaggaagaatagctaatgaatgctgggcttaatacttaggcaatgggattatccctgcagcaaaccaccacggcacacatttacctatgcaacaaacctgcacttcctgcacatgcaccccggaacttaaaataaaagttgatttaagaaaaaagaatttaaacaagagacacacagcaaaagagatgcagcatagagtaatctattgcaaaagaatactttgaaggttaagtgcagaatagacagtacaccctaagagagagaggtcagagtagtttgctcatgagaatgagacagtgttgcgttttgctggagaaacctcatttctgggaaacttacatgattattcataaggaggtgggaaaaggtgttactaataagcatgttctgggtggtcttctgggtgcacacgcacagtagctgtacatgcctgttcatacatcatgtgtctcattagcatcttaaatctccacccagagatgtgttttttactattataatgagcaacagatctgcttgaggacaggtaaaattaaaatgcacattctttctagaaacgaaatcctctactgaagggagctttgcttgaatgagctctattacaatgtgaatgctgaggcttactgtgttgattgtatggccaccaaggttgctgcatcccaaaaacatggtctcttccttgactacctgtcttgcctcaagattatcacatggatttcctcaagcaaatagcatttatgggactaggatgtggacatcagaagacatccaggaagcacttggaaaaagttttctccttgtttctacagacacgccgattgtgctagatgccttggggtcaataaagacccatgtatctcttggtcatctgagcagagttaaattaggaattcaggactggcttttcaggtaaaagaagtgggcactgacagcttggctggatttcccaggtccccatttaattattgtaataaaagctcaggctcattcactccctcatttaatgtctcagctcataagatgaatatctaaggtatggcaacggtctgcaataaacagaatgcttgtgtcccctcatatttatattgaaatcgtaacccccccggcaatgtcacggcataaagaggtagggtcttagggtggtgattaactcgtgagggtggggcccttatgaatgggattagtgcccttctaaaaagtaccccaaggagctctctcgccctctctctaccatgtgaggatacaacaaggaatcagcagcgtgcaacctggaggaggcctttcagcagaacccagccatgctggcacccagatctcagacctccagcctccagaactgtgagaaataaatttctgttgtttataagacactgagtctgtggtatgatgttgtaacaacctgaattgacaaagacatagtctaagtaagaaataattataagacaactttatgccttggagaggcatcactggacagacagtctgtcttattaagtataggacacagtttcttttccaaggctggaaatggatggagcctgaagatgtctctgatgcatcctctcccaccgctagagggcagcatcctaaggatccgtttccgaagcgctggaattgcgtttttagaggtcacagaccctttggtaaacaaataaatgctatggacgcctaatttttagagtatgttctcatgtttacaggttcttctatattcagaattttaaaatatcattctcaccaagaatcggaacttactgaaaaagaagggagtgaaagaatttctgagttcgtgggaaacctggccatgcactgcagtgtaatgaaaactgggactccagggggcaaatgagggtaaatgctgttcctaaagcggggatcagttaaaaaaggtcaatcactaccttaggtgattggtgaaaggttggtgagtttagcccatgagataatatatgtgcttctcttttggggtcccagcctcccaaagtgctgggattacaggcatgaaccaccgcgcccagtctcttatggattttttttaaatcaagaattctctggaaagaacattttcctttccggaaggggccacgtatacgctatcttgagaagaaggcaggttatatttgagaagaatcaaaatttaatgtcagatgcagcaatgaggtttcatgtttagcaaatctgagtctgattgttgaactattacatggacaacataatgtcacagtgggaatctagtgaaaattggcccaatatgtcttgagaagccactaggggaagccaaacactacgtaaccaaaaaaatcaaattggggttaggaaaacagaattagctaccagggaaaataatgtcccaagtgttctcaccttcttcttcttaaattgaagtttaaagcattttgcggctcaacccctaaccgcaaaagaaaagcacacatattatcccatgggctaaactcaccaaccttccacctaaggtagtgattgtcgtcttttaattactccctgcttcaggagcagcgcttaccctcatttgccccctggagtcctagttttcattccactgcactacatggccagacttcccactggctcagaaattctttcactctcttctttttcagtaagttccaattcctggtgagaatgatattttaaaattctgaatatagaagaacccgtaaacatgagaaaatgccctaaaaattaggagtccagagcatttatttgtttaccaaaagggtctgtgacctttaaaaactcaatttcagccctttggaaacggattcccaggatgctgccctctagcggtgggagaggatgcatcagcgatattttttttttttttttttttttttttttttttgagacggagtctcgctctgtcgcccaggctggagtgcagtggcgggatctcggctcactgcaagctccgcctcccgggttcacgccattctcctgcctcagcctcccaagtagctgggactacaggcgcccgccactacgcccggctaattttttgtatttttagtagagacggggtttcaccgttttagccaggatggtctcgatctcctgacctcgtgatccgcccgcctcggcctcccaaagtgctgggattacaggcggcatcagcgatattttgaccagcctggtcaacagggcgaaaccttttctctaccaaaaatgcaaaaattagctgagtgtgttggtgtgcacctgtaatctcagctattcaggaggctgaggtaggagaatcgcttgaacctagaggcggaaatttgcggtgagcggcgatcacgccactctgcactccagcctgcacgacagagtgagtgagactccccttaaaaaaaaaaagatgtggaatgcatgtttacaacagcacaatttgaaattgcaaagatacggaaccaacctatgcatctattgaccaacgggtgaataaagataatgtggtatatatgcaccatcgaatactacgcagccataaaaagcaatgaaatcatgttttttgcagcaacttggatagagctggaggccattattctaagtgaagtaactcaggaacggaaaaccaaatattgcatgttctcgcttataagtaggagctaagctatgggtacacaaaagcatacatagtgatataatggactttggggtctcgggggtggggaagttgggagaggggtgagggatgaaagaccacgtattgggctgggggtagtggctcatgcctgcaatcccagcactgggaggccgaggcaggcaggtcacctgaggtcagcagttcaaggccagcctggctaacatggtgaaaccccatctctacttaaaaaaaaattacaaaaattagctgggcatggtggtgggtgcctgtagtcccagctactcgggagactgaagtgggagaatcacttgaacccaggaggcagaggttgcagtaaactgagatcacagtaagctgagtgcagtggtgcactccagcctgggcaacagagcgaaactccgtcaaaaaaaaaaaaatgactacaaagactacatactgggtacagtgtacactgcttgggtgatgggagcaccaaaaatctcagaattcaccactaaagaactcatctatgtaaccaaaaaccacgtgtacccccaaaactattgaaatttagaaaacattctaaaaatgaataaaataaaataccagtaagacatgtgatgtatgtactcatatgtagagcaatagcacatgcgcatccaggagaccacccacaacatgcttaaaaacaatacccctttccatgccctcatgaataatcgtggaagacttccataaagggagtttcccagtgccagtctgggctgtctcattctcaagctgccgcctctgacctagctttcagagtgcactttcgctctgcaataaactcctttgccgacttttactctgcacttgactctgaaattcttttgtgcggtgaagtcaagaacctgaactggccagccaacaacaatagcagcgtcaggctccgcaagttaaagggctcagacccacctaattgctgccacttcaggtggcagtcgcaaggtctcaactgccacctgcacttctgaccaactggctataaattggggagttcccatgaccctctccaaaggttgaataatttgctaaaatggttgcagaactcagaaaacactttacttagattgttggtttattataaaggatacgacttaggacagccaaatgaaagagatgtatagagcaagaaatggggggctgggtggatggtgcagaactctcaggccctgagtgtgccatgctcccagtactttaaagtgttagcccacccggaagctcactgacaggttttattccttaggcataattgattaaatcattggtcatgggtgattaactcaatctacagtccctcttgcctccctggaggtcggggtggagctaaaaattccaaccctctaatcacgtcttggtctttccagtgagcagccctcatcctgaagctacctaggggcccccagccaccagtcatctcattcacatgtaaaagacactccttactccagagaatccaaggattttggagctgtgtgccaggaacctggacaaagaccaagtctttattttttgttttgtcacaacaggcaatatagtcttctggttaacagcccaggctctggagacacactgcctgggtacagttccatgtcatcttctaaaatgtgcccttagcaagttatttcttaacatatccatgctaattcctcatctgtaaaatggggataataccaactacctcttagttatgttatgaaattacatacattgattttttattgttcaaaaaagaccatgtacatgtcttttgttaataaaataaattgaatgtcattaattgttttcttgtccagattagaatttcatatctgagctttatccaccctcttctctccgtaatgctgaattttacaacctatacaaccgacataactacagctccaggaaatccagaaaaagggtgggactgctctaacctcagctgctgatggcctctttgtagattgtcttagctgatgcctttactctggaagatggcacagtttctcattcctttcccaggaaaggaagatccaatagaaatttacccatcctctcgcccttgatggctacaacctgaaaatgtcttcaatgcatatgacctcactcctagagggtcgcgttttgagaatgcataaaagctcactttgggacgccaaggcgggcggatcacgaggtcaggagatcgagaccatcctggctaacatggtgaaaccccatctctactaaaaatacaaaaaattagctgggcacctgtagtcccagctactcaggaggccgaggcaggagaacggcgtgaaccctggaggcggagcttacagtgagccgagattgggccatggtactccagcttgggtgacagagcaagactacatctcaaaaaaaaaaaaaaaaaaaaagctcaaagctattctttgtgggccgatgatggatataataaacccctcaaacttattctcagatccacaggaaacttgagcgactccctatgttctgatattttctaaatacaatgtactgcattccttttgacttccccaagcccaaacattccagagaattttacagaaattctatttttgatctgaatttgggggcctgcacatgagactttctctcaaattaccctctattttgtccagaaatcccttatagttcatgtccttgggactctgttgaaggggagaaggaggaaagtcctccctactgtttctcatgccttcttgagctctgtgtcctgcatctgtagtgcatgctattaactttgctcccagatcttcttacccatcagggcactcatccctcagatgctgtcacgagaagctggctccccccgctctggagaattgtccttggtcaaacagaagtcacttcacttcggaggtgaaggtccccctcacttcctccaacttgttgtagaaccccaaaatttaggttcacattcccaacgtgcagtcagccaaacattgacacttcagtgcttaggagtagagaggattatcccatttggccaaagtgagagggtaggagagaaagtctctcagatctaacctgcctgtgaacataatagggcttttatgaggaaggtaggtgtgtgggaggtgagatgccctaataatcaaaactgattgcattcttgggcctgatcaaacttctggatgccgtgaaggaggtctgtgtgacctaagaatcagtttcttttttgtttgttggtttttgagacaggatcttgttctgttgtccaggctggagtgcagtgaggggcatgatcatagctcactgtattctcgaactcttgggttcaagtgatcatctcgcctctgcctcccaaatagctgggactacaggcgtgcaccaccatgcccagcaactttttttttttttttttttttttttgagacagagtcttactctgtagcccaggctggagtgcagtagcataatctcgggtcactgcaaactctgtcttccgtgtcccagttcaagcaattctcctgcctcagtctcccaagtagctgggattacaggcacgtgccaccatgcccagctaattttttgtatttttagtagagacagggtttcaccatgttggccaggctggtctcgagctcctgtccttgtgatctgtccacctcggcatccaaagtgctgggattacagacgtgagccactgcgcccagcacccagctaatttttaaaacattttgtagagacaggatctcaccatgttgcccaggctggtctcaagctcctgggctcaagtgatcctcctgctttggccttccaaaatgctgggattacaggcatgaaccaccatacccagccccatggaccactgttctttagaaaaacaagttcattaaccctgcaagtagccccaggagttaggatatgaagttagccaattactcgtgactccctctaccaaaatggctatgtgaaagccagcatgcatggaggaagacgggaaaataaggaaaacaaatctctcacgattttcataatgcaggctcggttacaaacccagaaggcagaatgcagtcaatgacttggtgatatgggggtacagaagaccactcccatacctcaaagagccactgtgaggtgcagttcaacctccagtgcttctccctggaattagactaagctacatccagctgagaccacattccagctcagctccctttgctgtatttcagttttctcacatctctatttctggaagctctgtttcaataaatcacttgaacaagaatccctgtctgaggctgtgcttcaggaatctaatctgtaacaccatctctccaagggagaacatttaccttgttagtctcagtccagaaggaaaccttgttatttcaggccacctgtgttgcaaatcccttcagtctctcacccagggcattgcatttgaatttcaatgctaaatcagatgtatctttcttcaatattctgtatatgaaggttcacagggaagaaactcatacagatcatttgataatactgtcaagcaaaagttgtagaaggccattgttttggactgagctcctatactaggcccaacggaccagaccaaaccaaaataaagtcactcatgctaaatgccacattatccaactgaaactttaagatggcagaaaaatccccaaacagatcagtttttcctgacaataggagatcccactttacctcagtcagtgtaagaaggaagtcccctctgctttaacccttatttaaaaagtaaccggaagtaatttgacatgaaccaatcagctttttttcctatttttctgtttcctttttcccaccttacaaaattcactgttctgccactggccagtgggagctctcattctatttcatagaatgaaggatgaataaaaggattcatgaattacgaataaaagccaataagatctttatctaaatgtgctgtaattttgtctttcaacatgatttgccttaaactgatattcctcacacttattttcatccacatacaacttcttatcatatcttatcctaaagtatcttatcctaaagtataatgaataccacagactggacaatttttaatgaaaagaaacttactgcttacagttatggaggctgggaagtacaaggtcaaggggctcacatatggggagggtcttcttgtttcatcagcccacggtagaaggcagaagaaagggaaggaaagagagagagaaagagagagagagagagacactcgatgttataacaaactcactcccgagatactgagataatgacattaatccattaatccagtcaggcaagccgagctctcctaacctaatcacctttgattaggccccatctcccaacactgttgcattagggattaacttttcaacccatgaactttggagaacatattcaaagcataacaagaagggaaaactagtttgctttttaaatacatgttgatgcacgtagcacacatctggacaccaggcaacatttttctaaggagcctcctactcatcaattcttctctaccccacccatgacaaacatattgccactttctataagtggcattaataggaatgtgaattatgagtgcagaggtacccagcaattctaaatggaaggaccatgacacacatcaataagaacaagatagaatgacaacctggcttaacaagatgccgtgactttataaacctatagtaatttaaggcatatgagatatacaagtcttaagctcagaggagaggctgatgacaattacaccactacagttaaagactgcaaactttagccgggcgcggtggctcatgcctgtaatcccagcactttgggaggccgaggcgggcagatcatgaggtcaggagttcgagaccatcctggccaatatggtgaaaccctgtctctactgaaaatacagaaattagccgggcgttgtggggggcgcctgtagtcccagctactcgttagattcagacagaagaatcgcttgaacccgggaggcggaggttgcagtgagttgagatcatgccactgcactccggcctgggcaacagacagagactccatctcaaaaaaaaaaaaaaaaaaaagactgcaaactttggcatcaggctggctggattcaaagcctgattttgccacttgttagcccatgaatagtaacaagatgcttaaattctctgtgcttgaaagttttcatctgtaaactagagataatattaggacttgcatcacagggtttctgtgaagatcaaaagaaatatgtgaaaatcaccttagcgttagaactgtgccttgcacaaagtaaacactcagtaaatattaactcttattatagaagagtgtgtgttatctcctcaactagataaaataatcatagaatgatggtttcagagttgtgaggccatttaatgcaattagattttataaatctaatctgtacaagtagacttgtgaaataaatctggaatgcctgctaaattttattgaaagcaatcgcgtgtttaatggtgcataatatatcaaagtacatgcatatttaatgctcaaaagacattatctgcttctagagtggattaacatttcaggcagtgagaatgggggtttattactttaatctaaatagggattaagttgattagattcagagtttggttgatttaagtactgattggtacacctgttcgtgtagggcacagtcctttcatcgctcccactaaaagtttaacacgggaactaagctatgaggatgcaaaaggataaggatgatacaatggactttggggaattgggggaaaaggcaggaggatgagggataaaagaccacacattgggtacagtggacactgctgcagtgatgggtgcaccaaaatctcagaaatcaccaccaaagaatgtattcttgtaacgaaaaaccacctgctccccaaaaacctattgaaacaaatatttaaacataaataaataggccgggcacagtggctcacacctgtaatcacagcactttgggaggctgaggtgggtggatcacctgaggtcaggagtttgctaccagcctggccaacatggcgaaacccagtctctactaaaaacacaaaaaactagctgggcgtcttggcagacacctgtagtcccagctacctggggggctaaggcaggaaaatctcttgaacccaggaggtggaggttgcagtgagccaagatcacgccactgcactccagcctgggtgaaagggtgaaactccacctcaaaaaaacaaatttaattaattgaataaataaatacatagactttgaataatcatcatccaaaaagaaaattaaattaaaaggatttccctttgagggagctatctgtgaaaggaaattgcttaatacaggtgagcacaaaaagagaaagcaccctcttatttcatattttatttttcaacttgttaaagattatattttcgagctactctcctaaactagaaacccaccagctctaacttagtattcttctccaggacaaagggtgtcatttgtaaggaatgacaagatctacagggaatgctaaaatgataaatttaatacatcagtgtgacttagttaaagcaaaatcttccagagtctcaaactttgcgtgttattttctggtagctcctgaaagcagtctgagaagaatacaacagaaaagatgaagaattgttttaaaacaaaaattcaaagtaataataataaataaaagcctaatattccctctcgcacttggcaggcaccaacctaccatttttgtacattcagctccacaagactgttaggttctactctgccatctcttaaaagttagcatctaattcacagtactatttaaatttccccagttgtccaaaagcatgtcctttatagctgttttaaaatccatcatccaatcagatttcatgcctttcattgttatgcttctttagtctcctttgtcaccatgcctatagactcaggggctgaggcgggaggcttgcttgagcccaggaggtcaaagctgcagtgagctgagatggtgccactgcactccagcatgggtgacagagtgagaccctgtctcaaaaaaaaaaaaaaaaacctctgtattctataaatataatatgtacaattattccatgtcaattaaaaataaaagagaaaaaagtctttataatccatgtatatgaagttcaaaagctggcattactgatctgcgatgacatagtcaggcaagttggtaccattgcataggcagagatggaaagaagcttgtgggatgctggaaatattctgtttctggatctgggtgctggctacatgggggcttaaaatcgctggtgttacactaatcactcatgaacttttctgcatgtatgtgcaacttagaataagaaaatggaattacggttcacatgctaggcatgcctggatcaggctagtggacagcatcctgtaccaccgtgtcccatcctaagtgctgtagaaacatgttcctaatacttcagtgcatgccaaaataggcaaatattttatttacatttgaaatctcacagtagcaaggtcaactacagccactttcccccagggagagtccaatattttattcatgtctcctaaactcttataatgagcaactaccatgggccaggtcctgtgcagggctctgaggatcacagggaaagacccacaacctccctcatggagaccaacattcccagaaaacccacgcaaataaacatagcgaggtatggtgaagctccgggagtgctgccgcaccacacagaagttctgacctggcctggggcgtatgagagaagcctttgatgagaaagtagggaatgaggcctctgaaagtaaggggagggtgtgctccaaacaaatgcaacaaaaagagaaactgtaactgcacacggttttcagcctcatgcctccgtggaacctgcctgtcaggcgggcacctggaatctcaagcaactttctcaaggtgaggcgatttttttctttcatttctcaagtagcttgtggtaagaaaagtgagctgagactgggtgcagttgctcattcctgtagtcccagctgcttgggaggctgaggcgggaggatcccttgagcctgggaggcggaggttgcactgagccgagatcacaccactgcctgggtgatagagcgagaccccatctcaaaaaaagaaagaaaaaagggaaagaaagtgaactgagtgttctgtgtctcccaaggccccttgaatggctttgtccttcacttggaataaaattcaaacttcttcaccttgccccgaccttggttggcctttccagtttgagcttttcccgatattcctctcccacaacacacctcaactacagtggcctcttatctgcacctcagacatgaaaaggtttttcatgtctctgggcctttgcacttgatgttccctttgcttagaacactcttccctctccttcagtgaaaatgatacttcctcagagacatcttaccttaccttaaaactactgcacatcctctgaatcagtgctgttggtggcattcataacaccagtagtatcataatcagaactgcgtattgtcttgtttccttttttatttcctgcttccctccctagaatgccagcacttgggaaggcggcagtgagttctatttttgtaaatcccaatttcctagtcactggaacaaatcttagcagagcaggcattcaaataattaagcaaacaaatgaagaagtgtcaggggtgttttaacgttaagttctgcaaaattccctgctattggggaggtcataccctttgaatatatcactctctttccatcctcattagtgtcatagggcaactccagggactgattctaacatttaaacggaaaatttgaggcccactttatcctttccgataggatttgggagtttctacccttgactgtgttagaagtgttcctgaattttattcctgtaaaagacatagatggggccaggtgcaatggctcactagcactttggcaggccaaggctggacgatctcttgagcccaggagttgaaggctgcagtgagctatgatggcaccactgcactctagtctgggcaacagagtgagaccctaaaacaaaacgtaaaaagatacagatgggtccttcaatcatttggccttcaggctacctgcaatgttcccagagacagagttctttcgctagtccaagacttttccaaaccaacctggtgggggtgtggaggttgcgggagaggacagagttgaggggtagtataagatgggccaagaccagagtcccatctctgcttcagaaagcttgggtccacattgagtgtggggaggccatatctcatggatagagactagatctgtctagtgaattacactcaccccacaaataagacccatcatggagaagaacgttagggggaggaataaataaatgagttaataaggtgcctgaaaggtggagtaaatgagtaacagagggacagagagagggatgctcagaggaaagaaagaagcatgattcttttaatgcaatttatattttaagtttccttgctgaaaactcgttatgggctccccagctgcccccaaatccatactcaagagaagatacaagatcccctatggtttaggctctgccaagttcttcactgtcatccattgctgtctcaactggaagaggttgaaccgagatgggcgggtgaagggcttaactcccatcatcccaaactcctagcaggatgcctcctgctgcactccgggtctcactggaagccgtccacgcacagggcacctccttcaccttccagtttgaatcatcttaccaacttatttttctctcagcgccttgtttatttactcattgatcccaagtgacatttttgaacattttatccattttcagttcgctccactttcttttgttttcttccactctctggagtcaaggatcagtctttttttttttttttttttttaaacatagttttattcccagtgccctacacagcatcaggcatataataggttctaaataaacagatattgaatggattattggagggcgtggtattagggtaggacagggtggggacatgattacattaaaattctgcttaaataagcgggtcttttagcccagcagtcacatagactcagctcaggagctctgcagcacacagctgatcgaacccactcatttctagaggacaccatgtttggtaagttgggcgaaggcaagaggctggggtttcagtgattgggttgcagacaaatcaagtgagaggtgtgggaccttgtggtggcttcttagaaaccactgggtaaatttagaaaccactgggttataccaacaaggattgtttgaaaaacactttgcaagggattctagtaacttaggaatttgtttctccacatctcttttttaaagagatggggtcttggtatgttgcccaggctggcctcgagctcctaggccctagtgatcctcccacctcaccctcaggagtagctgggacttataagtgtgtgccaccatgtcccgctaatttttaaattttttgtagagacaggatctcactctgttgcctaaggtcgtcttgaactcacatcctttttaatgcctggtaactttcatactttttaaatgtcagtccattgatgggtataaaatagtatgtgatctttaattcccatttctttactaacccgtgtgattgaatctgttcactctattttaaaggccattctgtttttcccctatgctaatttttatatttatatcatttcccagtttttagtatgttttttttcttgaggcttagtagaatatttttgttgtcttctagacactaataatttatctcttatatgtgttgcaaatatattctcccagcctggcttgtgtttttcaatttacttatgagtaccgttgtacaaatattctaaaagttgtcattgtgatatttatcaacattttccttttataattgtacttgtaaaacgtagtttagaagtatattactggctgggcatggtggctcacacctgtaattccaacactttcagatgccaaggcaggcggatctcttgaggccaggagttcaagaccagcctggacaacatggcaaaaccctgtcactactaaaaatacaaaaattagccaggcatggtggcatgtgcctgtggttccagctacttgggaggctgagacacaagaattgcttgaacctgggaggcagaggttgcagcaatctgagattgcaccgctgtactccagcttgggcaacagagcaagactctgtctcaaaaacaaaaaaagtgtatttcttggctggggacataaatgtaattttagttacattttattttaacttcttaaaatgatttgattctaatagaaaaattatgcatcaacaagctcacttatcaaaacttgtacctggctcttctaatacattttcctattgtttaatactaaacttacaaaaatactaattagtcgattttacatattgacctctcagcttggtagatgattttaaactcaaagccacatccttcctcgattttacctcctataacttatcaatgtgcagtgttgcttttctaaagaccagtagaattctaattaccattcctttgatggaaattctacttccctttagaagcttctggaaatttctatatattcctggtattctgatatttttgcaacaacgatccttttgttcatttattgtgctcatcgtggaatgtcttcattctggaaacccctgtgcctcatctctcaaatcttgaattttttttaataaatactttcatgatactctctgaaacattttttagtcagagatatttttagtcacataaatattgctagtgctggacatccctgagcagagatcttatttttttccgaccttttcactctttttgtccacttttgtatactttttctacttcctggaatagctttgtcttccaactcttctattattgcctaagggtttctttttagctactgatttcaaagaacatttgtcttatcagattttcctttcttttcaagactttcttgatgtatgagtgcaatatcttttatccgagcatattaattttaacatttatagattttctttttttttgtaatttttttctaattgttttatatttttagtagagatggggtttcaccatgttggccaggctggttttgaactcctgatctcaagtgattcaccctccctggcctcccaaagtgctagtattacaggcatgagccaccgtgcccagccttatttcttttcttaagaaaaaatgtggttatttgctgctttcctcctcttctttctttttctcttccactttccctttcttttttctctctttctctctgtctctccctctctccctttcttgctgtccccttcctgtttgagaatttttcttcaatgtcctgtaaatttttgttctccctttgtgtctaaacaaatgctgagacactaagagaaacccatgtgcccgatcacttgtcttcactgtgcgataattgggcagcatgttggcttctgtttttccatgtatttgcatgaggaataagagcatcctgaaaatagaaactttcctataaaatagatgaccatgagaatcaggttttactagatgatgaggtcttatttatattctaaaccatagtaaaaactcccattatgcactaatacagtttgcatatttgtcccctccaaatctcatgttgaaatgtgatccccagtgttggaggtgggcctggtggaaggggtttggatcatgagagcagatccctctgaatggcttagtgccatcctcatggtaatgagtgggttctctatctctaagttcacctgagatctggttgtttaaaagagtctgggaccttcccctgctgtctcttgctcccactctcaccatgtaacaccttggctccccttcgccttctgtcatgagtggaagcttcctaaggccctcaccagaagcagatgccagcactatgctttgtgtatagcctgcagagctgtgaaccaattaattcctcttttctaatttacccagttttaggtaattctttataaatgcaaaatggactaacacatgcaccaagcctgtaattaacagacttgcttctttggttactcacatcttccctaaaggagtgagctttctgggaccatgttattgttaaagatacggaggcaaacagtataagtgtactgatgctgccaaagtcacagagctagtaaatgagagaatcgacattcattcttaggtcactaagcttcatatctccttccctacagaccccattaataaatggccaaaccaatagcttcagggtctcacaagccaatcaacatagacagcagtgccactgagtctatgaccggttaggataatagggcctcaaatactcttatgaatcttatagactcatataaacctggtgtcaacatcatgccactattctattctatctcaataaggactcacccaaatctcatcttgaattgtagctcccataattcccatgcgttgtgggaaggatccggtgggagataactgaatcatggggcggtttcccccatacggtgctcatggtaatgaataagtctcataagatctgatggttttataagaggtttccccttttgcttaggtctcattccctctcttgcttgccaccacgtaagatgtggctttgctcctccttgctttccaccatgattgtgaggcctccccagccatgtggaactgtgagtccattaaacttctttcctttataaattacccagtttcaggtatgtctttattagcagcatgagaaacagaaagatgtccccaagttgctaggaaaacatattggtgcccaatgtcatggagaggttgatgttcctcctccaggggctgtaggatgaggccaccaaaataagcttatcccatctgtggcttaaaaacatgtcctgctcagtggaagttggcactgattttctaggaatgcagaacactcccagcaagagagtgaggagtgggtctcgtgagtcaaatgtttagcctaagctcttgattcacaggtcaagcttaggaaagaagcttacctttggaatatacatatttgcattctaataaaacatttttaaatttttttttgtattttcgtaggctattggggaacaagtggtgtttggttacatgagtaagttctttagtggtgatttgtgagattttggtgcacccaccaaccgagcagcatacactgcaccatatttgtagtcttttatccctcacccccttcccaccctttcccccgaatccccaaagtccattgtgtcattcttatgcccttacatcctcatagcttagctcccacttatgagtgtgaacatatgatgtttggttttccattcctgagttacttcacttagaataatggtctccaatctaatccaggttgttacaaatatcattaattcatttttatggctgagtggcattccatcatataatttatatatatataaattatatatatataaattataatatttgtattatatataattatatacaatataatttatatacattatacataaattattatatatatatacatatatatatatacacacacacacacacacaccacagcttatccactcaattgatggacatttgggttggttccacatttttacaattgcgaattgtactgctataaacatacatgtgcaagtatcttttttgtataatgacttattttcctctgggtagatagccagtagttggattgctggatcgaatggtagttctacttatagttcttgaaggaatctttacactgttttccatagtggctgtactagtttacactgccaccagcagtgtagaagtgttgcctgttcactgcatccacgccaacatctatttttttttattttttttattatggccattcttgtggtttcgatttgcatttccctaatcatttgtgatgttgagcattttttcatgtttgttggccatttgtatatcttttgagaattatctattcatgtcattcatgtccttagcccactttttgatggaattgtttggtttttttcttgctaatttgtttgagttcgttgcagattctggatattagtcatttgtcaaatgtatagattgtgaagattttcttctagactgtgggttgtctagaactctgctgttccttttgccatgcaaaatctctttagtttaataaagtcctagctatttatctttgtttttattgcatttgcttttgggttcttggtcattgtgttgctgtctatctcatttcttaggtctagtggataaaagggcgtccattgtctcctaaagtttttattattttttatttatgctctctatttcactgaagatttctcccctcatttcttgtatctttttttttaatttccttaaattgggcttcacttttctctggtgcctccttgattagcttaataactgaccttcagaattctttttcaggtatatcacggatttcttcttggtttggatccattgctgatgaactaatgtgattttttggggatgttaaagaaccttgtgttgtcatattaccagatttggttttctggttccttctcatttgtgtaggctctgtcagagggacggtctagggctcaaggctgttgttcagattcttttgtcccacaggtgttcccttgatgtagtactctcctcatttccttccgaatttttttaatgaaagccttttatctgttccctctgcagaagggccaaggcgttatcgtcggccacgcacaagatttctctccaaacaactcacagcattgagagaattgcttgaaaagaccatgcacccaagtttggctacaatggggaaactggcttcaaagctacaacttgatctatccgtagtaaaggtctgttcccaagtgtgtctgtaggtagcacgcctaacccagagcttcacacacacttttgatcattgttataacagttcctatttattggcaattgctatgtgtaaggacagatgttaagcactttatatttttattgtcatgagcacccactttattgaggaacactaaagctcacatagaagagctgtcttccaagcattataaacacaagagttggaatttgaacccagacctttccaactccagacccaccatgctacacaggactctttgaggctggatctcagatactcccatttgggtctgttcttgtgtattcaggatgggttctgcttaatcaggaccatcacagtcatccagatgcctgtcactaagttcccacaaagtattcatgggagaacacctggatgaaccctaaagatgacccaagctaaactctcaccccatactctgactttaaaatactttctctgggcaccaggaatggtggctcacacttgtaatcccagcactttgggaggtggaggcaggaggatcgcttaagcccagtttaagaccagcctgggcaacatagcaagaccatgtctttacaaacaaaaattaaaaattaaccagacatggaggcacatggctgtagtcccagctacttgggagactgagataggaggattgcttaagcccaggagttcaaggctgcagcgagctatgattgcagcactgcactccaggctgggtgacagagtggtagcttgtctcaaaaaaaaaaaatacaccactaataaaaacacccttctatttaatacatcacaatctaggtcatattccacccattgctagtacaatcctacacccacttttcccttgaaacccaggacagcagagagtagaaagggcttcccttgttccaataaatgtgagactctctctcacaccaaaaaaccgaattcctgaggaacatgaggatgcccctttatactcaacatccattattaacctcccccctcctccctccttagatctggttcaagaaccagcgtgccaaatggaagaggcagcagcggcagcaaatgcagacacggccatcactagggccagcaaaccagacaacttcagtgaagaaggaggagactccctcagccataactactgcaaacattcgtccagtaagtcctggaatctctgatgcaaatgaccatgatctacgtgagccttctggtatcaagaatcctggaggagccagcgcctctgcgagggtttcatcctgggattctcagtcatatgacattgaacagatatgtctgggggcttcaaatcctccttgggcctccactctctttgaaatagatgaatttgtaaagatctatgacttgccaggggaagatgacaccagcagcctaaatcaatatctttttccagtatgccttgagtatgaccagctccaatcttcagtgtaacttcttacacatcacttctaggggaggtctggatctgacccactgagacatatttccacacatctttaatggtttgaccccagtctaagtagatcaggggctgggaatttatctttttctgtagaaaaaacaataaaggaactcccctacctttcatcattgcctgcattttctgaactccatttgagtgcctcctcacccaaatttcagcattaaagattgtattcagagaagtgacgccaggaacacagtgacataggaggttcctgattgatggactgaataaacgtctgtgcctacatcagttctctctggaagaaagtcagaagtgagtggagagactcctacacaccaggcaactaagaaaatgtcttagcaggccagtcgcggtggctcacgcctgtaattccagcactttgggaggccaaggtgggtggatcacgaggtcaggagatcaagaccatcccggctaacatggtgaaacgctgtctctactaaaaatacaaaaaattagctgggtgtggtggtgggcacctgtagtcccagctgcttgggaggctgaggcaagagaattgcttgaacccgggaggcggaggttgcgtgagccaagattgcaccactgcactccagcctgggcgacagagtaagactccatctcaaaaaaaaaaaaaaagaaaaggaagaaaagacaagaaaaaaaatgtcttatcaaacaggcagcaaaagctgaagcactcagaaacactaaacccaccctgggcactgagccatacaatcaggaaggaatccccagttcccagcttctcccccaggagagaagcagtgaaccacacatatagcaccctaacagttgatggttaagttcctaacgagcctgcatcagggagttgactaggtaggtaaactacagacttacaagagcctgaacagaagctaggtgccacccaaagcttcaccccagctcagcccagcaataaatccaggtctatcaattcctcctggaagaagtttgtccacacattgagcaccccaacttttatacctgcactcaagggactgcatcctaaatcccctagctctggaaatggaagggattaggcatatgtgagtctccctagctcacagagaaaaaggtggttttaagcaggcacacaagcacttcagggctagccttcctccaccacactcccccaaccagagcagtgcagagaaggggtcaaaatgtacagctcccagttactcctcaaaaaggatttgccagcacactcttccagctgctgcttgatagtcatgcttttaaccagcctgtatctggaagtcaacagggcagacaaatgctggatccttgggagcctgaatgggagttcagacactgtccaagccttttgcccttgcttgctctagtggtaagtctacagactctccctggaaggagtttttccatgcagtgagcacccaaatttttgcagcttccacggcatcctaaatcacctatctctgggaactgaagggatttgacattcactagtctccctagatcacagcaaagaggtgattttaaactgatgcacaagcatttccaggagatgagaatagtcccagggacctgaggctgaacacacctagctggccactaccacctcaggtggcatctacttgcatgtgccacttacaggcctggagactggcctgctcagcccgtcacagccatcaccaacactagcacaagctgattgggagctagattgtcctgccaatattactgccattgcccatgccacccttgctgcccagtggccccaggaactacgcacctacctggcctacggctggcaatgccagcacccaagaaagccacctggaagcctgggaattggcctacctaaacctgctaaacctgtgccagcgtacaccaccctgggactcaaggacaggctcaccactgccaccactgggcccgaaaaccggcccacctgacatcccctatcccagaaaagcttcacagcctccaccaacaactgcaccttaagccacggaggaaataacactactgatgttgcttacagccaaataaatcatacagagactatacctggataaagaattcaaaataatgatattaaagaagctcagtgagatacaaaagaactcagaaaaataatacaaacaaatcagaaaaacaattcaggatatgaatgagaaatttaccaaagagatagatataaaaaagaaccaaacaaattctggaaatgaagacttcattgaatgaaatacaaaatatatttgaaagcttcaacaacagactaaatcaagtagaaaaaagaatttcagaacttgaagccatatcttttgaaataacccaggaagacaaaaataaaaaagaatttaaaaagaatgataaaagccttcatgacatatgataccataaagcaaccaaattttcaaattactggggtcccagaaggcaaagagagagaaaagggtaagaaagtatttaataaaataataggccaggcacagtggctcacgcctgtaatctcagcactttgggaggccgaggagggtggagcacctgaggtcaagagttcaagaccagcctggccaacatggtgaaacctggtctctactaaaaatacaaaaattagctgggtgtggtggtgcacacctgtagtcccaactacttgggaggctgaggcaggataattgcttgaaccaaggaggcggaggttgcagtgagccgagatcacgccactgcactccagcctggcaacagagcgagactccatctaaaaacaacaacaaaaagtgtgatttatacacaatggagtactatttggccattaaaaaataatttaaaaaaatgaaatcctgtcatttgcaacatagatgagcctaaaggacattatgttaaatgaaataaaccaaacacagaaagacaaataccacatgatctcatacacatgtggaatcctaaaaggtggatctgacaccttacttacaccttactcctgcaagaatggccataatcaaaaaataacaaaatcaaagatcaaaaaatcaaaaaataataggtgttgtgcatgtgtgaaaagggaacacgtttacaccgttggtgggaatgtaaactagtacaaccactggagaaaacagtggagattccttaaggagcaaaaagtagatttaccatttgatccagcaatcccactactgggtatctacttagaggaaaataagtcattatacaaaagagatacttgcacacacatgtttatagcaacacaattcacaattacaataatatagaaccagcccaaatgcccatcaatcaacaagtggataaaggaaatgtgagatatatatatatatatatatcgcacataccatggaatactattcagccataaaaagggaatgaaataatggcatttgcagcaacctggatgagattagagaccattattttaagtgaggtaactcaggaatggaaaaccaaacatcatactttctcactcataagtgggagctaagctatgaagatccaaaggcataagaatgacacaatggactttggggattcaggggaaagaatgggatggaggtgagggataaaagactacatattgggtacaatgtacactgcttgggtgatgggtgcaccagaatctcagaaattgccacttaggaaattattcatgtaaccaaacaccacctgttcccccaaaaacctactgaaataaaataataaaaataaataaggctgggcgcagtggctcacgcctgtaatctcagcactttgggaggtcaaggcgggtggatcacctgaggtcaggagttcgagatcagcctggccaacatggtgaaacctcatctctactaaaaatacaaaaaaaaattagctgggcatggtggcgggcgcctgtaatcctagctacccaggaggctaaagcaagagaatcacttgaacccggaaggcagaggttgcagtgagccaagatcgcaccattgcactccagcctgggcgacaagagggaaactccgtctcaataaataaataaataaataaataataaataatttaaaaaaattgaaaaaataaatacattttttaaagtggacctcatagaagtagagagtagaatggcggttaaaggaatctggggtcattgggggtaaaggggagttgggaagacactggtcaaaggatgcataattacatttagatagaaggaataagttcaagagatctattggacagcatgatgactataattaatggtgatatattgcattcttgaaaaatgctaagagagtagatgttaggtgttctcaccacaaaaaaatagatgataactatgtgaggtaacacatttctttaaattagctgatttggccaggtgcagtggctcacaactgtaatcccaccactttgggaggctgaggcaggaggatcacctgaggtggagagttcgaagaccagcctgaccaacatggagaaaccctatctctactaaaaatacaaaattagccaggcatggtgtcacatgcctgtaatcccagctagtcaggaggttgaggcaggagaatcacttgaaccctggaggcggaggttgcagtgagccgagattgcgccattgcactccagctggggcaacaagagtgaaactccatctcaaaaaataaataaataaataaataagctagatttaaccattccacaatgtatacatatttcaaaacattatattgtacaagataaagtcatacaattttaaaaaacaaataaatttagaacaaaatgatagggaaaggtattaggggctgagtggtatatgggaactgcgtactacctgctcaattttctgtaagcctcaaactgcttcaaaaaataatgtctattgccaggcgcagtggcttacgcctgtaatcccagcactttgggaggctgaggtggtttggtcacctgaggtcagaagttcaaaccagcctgaccaacatggtgaaaccccatctctactaaaaatacaaaattagccgggcatggtggtgcatgtctgtaatcccagctacttgggaggctgaggcaggagaatcgcttgatgctaggaggcagaggttgcagtgagccaagatcgcaccattgcactccagcctggacaacaagagtgaaactccatctcaaaaaaaattataataataatgtcttaattttaaaaaaaaaatgtctagctcggccgggcgccgtggctcatgtctgtaatcccagcactttgggaggcagagatgggcagatcatgaggtcaggagttcgagaccagcctgaccaatatgatgaaaccctgtctctacttaaaaaaaaaaaaaattagccaggtgtggtggcatgcgcctgtagtcccagctactcaggaggctgagacagaagaatcgctttaacctgggaggcagaggttgcagtgagccaagatcgtgccaccgcactacagcctgggtggcagagcgagactctgtctcaaaaaaaaaaaaaaaatgtctagcttgatcttaaaggaatgaatgattccctaagagaacttagtgagggctggagcccttgagttccaccagccaatcccaggagttagctgtaaaagtcactactcacctttgcaaaattcaacttgatcaggtacctctcctttagtttcaggaagaagaagcaagaacctttaaataattaataagtaagtgactgatgtgaagaaacgctgaggctctaaagctggatggaacagagactggactattctctgaccatctaagtctatgcagctataaacaagaaggtaaagctgcaggggctgacctggaggcctcaagatgtatcgataaaccaggatggtagcagctgcggaactgtgaggtgcagcggtccccaatgtttttggcaccaggaactggtttcgtggaagaaaatttttccacagacggcagcggtggggtgggtgggttggggtgggggattgtttggggaaaattcaagcataatacatttattgtgcactttatttctattattattacattataatatatcatcaaataagtatacaactcaccataatgtcaaatctaatgggagccctgaacttgttttcctgcaactagatggtcccatctgggggtgatgggagacagtgacagatcatcaggcattcgattctcataaggagcatgcaacctagatccctcgaatgcgcagttcacaatagagtttgcgctcctgtgagaatctagtgcccaagctgacctgacaggaggcggagctcaggctgtaatgccagcgatggggagtggctgcaaatatagatgaagctttgctggctggcccgctgctcacctcctgctgtggcggtctggttcctaacaggccaccatgggtacccgtctgtgggggtggggagcgggggtgttggggacccctggtatagagtgctctcttgtaacccacccatcctctgagtgcagatttgcaaatacaaccacgttctctagaagggaccctatgagctggaggataagaccacagcctggagttttgcttttgactttcgtaatgtttaggcattttttatggtgagcatagcttacttctgaaatttaataaacgactgtattaagcggtgaaatagtgagtacacggttgtttactttgttattctgtttgcatgaacatttaagaaaaataaaacattgagaattgttggtggcaggtgtggtgggagctttttaaaacaacaacaacaacaaaagctgttccctacatgtaacagggatgtctgtcttcggaggaattggtgagctgcatctcaccccccggtgaagcaaggggtcgtggtggtggaacttgactgggaagtgggaactgatcctggggagcaatcccagaagcctggggctaagccatgtcctgagagtttgggaaatgaatgtattaagcagcccagatgcctaactccagggtcaccaccagcctttgagctccagggggcgctccgcgaacatcccatgaaagcgcgcggggcgcttgggatgatgtttgcaggggaactgagccaggctgtggtcctctgtgccatctcctgccggtgggcagcactcctgttgtgcacagggacccctgtttcctaggtccacaaactggtcgggaaacacgagttgacccggccgccccaacctgctttctaacaagaggttctgtccaagttccccgctcgactttcaatatgtcactcagcgcttaagcctcaccccttatccttgatgtccaatcaggagcgagggttggatccccaggggcctggggaggcagagggttctttttttttttttttaaacctaaaaatttaaatgaagatgaaaatggaagattcttcatggaagttttaatggcaacaattagtctacgaaaaaataggaagtctgaatggaccaataaccaaagaacttacaaaggaagtaaaagatctaagaaagtcctagaaggttttatgggcaaattctgctatacattccgacaaatcgtaattgtactgtctccttaatttttctgtaaatctaaaaccattctaaaataaaaaatttattttaaaaatgtatccaatccccctcgtccaaacctttgaaatgctaaagatttcttttaaaaccctcaatatctctgattattttgttaaggtttttgtttaagactatctattgaaggcagggcacggtggctcacacctgtaataccagcactttggaaggccaaggctggaggatcacctgaggtcaggagttcgacaccactctggccaacatggtgaaaccctgtctctactaaaaatacaaaaattagccaggcgtggtggccctcgcctgtaataccagctcagctactcaggaggctgaggtgggagaatcgcttgaacctgggaggcggaggttgcagtaagccgagatcgcaccactgcactccagcttaggcgagagagggagactcctctgtctcaaaaaaaaaaaaaaaaaaaagagagagagagagcatctattgaagagtgagttttcttacaatgcccaaagcaactgtctccttctttccctggccctctccatgtctgtattcacatagagtctacataatgggcaaattgtgattaacaactttgtctcctgcctttaaaaaaaaatcctaaaatcctatcatactccaggccgtctccacgtctgcttaatgaactgtcttaatttttatttatttatttatttatttatttatttatttatttatttattgagacagagtctcgctctgttgccaggctggagtgcagtggcgtgatcttggctcactgcgatctgcgcctcccgggttcaagtgattctcccacttcagcctcccgaatagctgggattacaggcacgcgccgccacacccagctaatttttgtatttttggtagagacggggtttcaccatgttggcaagatggtctcgattacctgacctcgtgatccacccgcctctgcctcccaaagtgctgggattaacaggcatgggtcactgtgcccggccgaactgtcttaatttttgagagtaggtttattacactgctcgatggacaaaaaaattgggcactcttctaaagctcaggggaaagggtgccaagagaggagtcccagggaagagatgttcagagaacatcataccaccccacctgctctcttttttttttttttcttcaggaaatgaggtctcattatgtttctcaggctggcctcgaactcctggctgcaagccatcctccctcctcagcctcctgagtagctgggattccagctgtgagccaccacgcctggcttgacttttataatgccttctcctttgacagtttgaagcctcttggttaaagcaaagggggacctggagggtgacttcagtgggaagcgggaagagtgactggaaactggtcccttctgctgcatgtctcagtgtaagtgtcaagaagtgctggggtaacgttagccacttcctctctgcaaccagcccccaggcgcttcacttctctctttcctccacctgagatgacacagttgtggttaaggccctggaccaagaggttagcctaaatgagagtcccatctctgcaacttctacctggatgaatttgagcaagtgattcacctctctgagcttcggtttcctcatctgggaaattgagataataacagttaatgtctacatcataaagttgttgtgataactaaataaaaacgtcatgataattaaataaattaaaatgtggcccgggcgcggtggctcacgcctgtaatcccagcactttgggaggccaaggcgggcggatcacgaggtcaggagatcgagaccacggtgaaaccccatctctactaaaaatacaaaaaaatagccgggcgtggtagcaggcgcctgcagtcccagctactcgggaggctgaggcaggagaatggcgtgaacccgggaggctgagcttgcagtgagcggagatcgcgccactgcactccagtctctgggcgacagagcgagacttcgtctcaaaaaaaaaaaaaaaaaaaaaaaaaaaaaaaaaccttgtcactttaatgttttactttattggaaagagattgttaaggattccagctagttgtttctggatagcagaaatgactagccttcttggaacagatcttctgtcttctgaaaaagtcactagaataactcttcagtcacacacatgtaaagcaagtgtttaccccaattgctaagaacccaggaagggaaaatcttaagggatgtgggtattctgggagtaaacagattgacagccacactccttcactttgagatacaaaagttctaaaacatttctgttaaaccagagtggtcagctctcatgagaggatcgaggaattgctataggaaaactcaccataatggttaggggtgtgtgtgttagtagctcagacacaggtaccttagagagctggtattagctaggaaggactactgatgggttgaatttgtatcccctgtggtaagaggcataacaagctgatttctaactgagggtagaaagtgactgtgttaacttggggctgctgcaattacaggaccacaagctgggtggtttaaacaacagaaatttattgtcttgcaaatctggaggggagggtagaagtcaggaatcaaggtgttggcagggctgcaccccctctaaaggctctaggagaggatcctttcttgcctcccccagtttctggtggctccacgtgttccttggtttgtgacagcagctctcccatccctatagagagaaagtagatggtggcttagggatggggaggatggagtgacaggggatgatagctgaagacataaggtttcttttggaggggatgaaaatctaaaattgatcatggtgattgttgtccatatctgtgaatatatgaaaaactattgaattgtatactaaatgggtaaatgttatggtttgtgaattgcatctcaatgaagttttttttaaaatgacacaaacttgagataagagcccaactttattcttttgtatgtggccatccagttgtcccagaaccatttgttaacaggactatcacttccccactgagtaatcttggcaacctagtggaaagtcagttggccgtagacacgtggttttatttctagattctacttctatccttttgatctatatgtctgtcttcatgtctgtaccacactgtcttgattacttttgccttaggttggtacaaaagtaatttcagtaaattttgaagttgggaagtgccagtcctactttgcttttctttttcaagattatattggttattctgggtcccttgcgattccatatgaattgtacattcagcttgccaatttctacaaagtcagctgagattctgacagggattccactgaacctgtagatcaatttagggagtattgccattttaacaatacaaggcttctgatccatatacaagagagattttttttccatttatttaaatcctctttcatttctttcaacaaaatctcaccatttttagagtataagttttgcatttcttttgctaaatttattccgaattttttattggttttgatgctattgtaaatggaattgttttcttgatttcgttttcagattattcattgcaagcatatggaaatacaattgatttttatatattgacctggtatcctgcaaccttgctgaacttgttcaatagttctaacagttatttgctggacttcttaggatttttctatatacaagatcatgtcatctgcaaagagtttacttcttcctttcaatctggatggatgctttttttttttttttttcctttcatgcctatcctgactagaacctccagtacaatggtgaagtggtggaagcagacacctttgccttgttcctgatcttcgggggaaagcatccagtctgttttcactaagtatgatgttagatgtgcttcgtagaggccccagtgtcaggttggggaagttctcttctattgttaacttcctgagagtttttaccatgaatgggattttgctaaatgcttgttttgtatctattgagatgatcatgtggtttttgttttgtattcaactgataggatatactatattaattgatttggggatgtaaaaccaatcttgcattcatcctgtgataaagctcatttttcatggtacgtacttctttttatatattactggattccatttgctagtatttatttgaggatttttgcatctgtattggtaaaaagatattgggctgtaggtttcttgtggtgtctttgcttggtcttggtaccagggtaatactggccttaagaatgagttgggcagtgttccctcttctatttattggaaacctttgtgaagaactgatattaattcttcttcaaatgtttggtagggtcagtggtgaagggcctagggttttctttgtgggtagtttttatattattaattcactttctttgcttgctatagatttatgtagatgtcctatttctcttagactcagtttcagtagtttgtgtctttctagaaatttgtttttcatctcaagtatctagtttattagcaaatagttgctcacagcatttatttctataaggttggtagtaatgtctcctctttcatttctttttttaaaaatttaaattttattttaattgaaaaaatagtaattatatatatttatggggtacaatgtgatgttttgctatgtttatattgttaaatggttaaataaaactaattaataaatctgtcacctcacatacttatttttcatgatgacatttatgataagtgaaataagccaggcacagaaagacaaatagactccatatatatgtgagatacatggaatctaaaagagtcaaactcacagaagtggagagtaaaatggtgattaccagaggctggggaggaagatggatggggaaagggaaactgttgatcaaaaggtacagtttcagttagacaggaagaataaactttagtaatctattgcataaaatggtaattataataaataataatttattgtacatttcgaagtccctttttcatttttgattctagtaatccagtctgctattttttcctggtatatctagccaatgttttgccaatattttggtttgtaaaagagtcaactcttggtttggttgattttctctattgtttttctattctctatttcacttatttctgctccaatcttttattattttctttttctacttgctttatgtgtagcttgctcttctttttcagtgtcttaaggtgaaaatttaggttattttcaatcacttccttaatataggcatatacatctatcagatttcttttaagcactgtttttgctgtatcctacaagttataaggtatattatgtcttcattttcatttatatcaaagtattttctaagtcccttttaatttcttctttgacctcttggttatttaaaagtgcattgtttatgagaacatatggacacagggaggggaacaacacacattggggcctgggggtgggtgaagggagagcatcaggttggatagcaaatgtaatgcatgcggggcttaatacctaggtgatgggctaacaggtgcagcaaaccaccttggctcaggtttacctatgtaaaaaacctgcacatcctgcacatgtatcccagaacgtaaaattaaattaaattaaaatttaaaagagagtgcattgtttaatttccacatacttgtgagttccccagatttctgtcttttatttatatataatttcattatgttgttatcagaaagtatgcattgtatttctactcctttaaatttatcaaggtttatggcctagcatgtggtttatcctggagagtgttccatgtgcacttgagaagaatacaaattctcctgttctacagatatctgctaggtctagttggtttatagtgttgctcaagtgttttatttccttattgattttctgcccaattgttctattcgttatttttttcctgacttgaggtatgactgacaaataaaaattgtatatatttaagatgtacaatgtgatgttttgatatacattgtgaaatgattaccacaactaagctaattaatatattcatcatctcatatagttacaacatttttttaaagttgggtatcaaaatctccaaatattgttgcttattgtgtatttcttcatttctgtcagtatttatttaatgcatgtcggggctctgttgttggatgcctatgtgtttataattgttacatcttcctgatacagtgacctgtagatcataacatatttcttatgtctggtaacgttttttaaagtctattttgcattattagtatcgctgttccagcttccttgtggttgctgtttgcatgatatatcttttttctttctattactttcaatattttgtatctttgaatctaaagtttgtcttctgtacacagaatatcattggatattgttttttaatacagtctgaaagtctctgccttttgatttattcaatccattcacttttaaagttattaatgatatagttagatttacatttgccatttcactttttcttttctatgtcttatgtcttttttgctcttctattcctcctttatgttttcttttatattaagtgaaagttttctaatataggattttaatttctttactgattttttcactaatttctgaattatttcctccgtggttgctctacggcttatcatatacatcttatcaaaatgagcttcagatttatactaacttaatcctagtgagatatagaaacattgttcctatgaagctctattgccttttcccactttttgttagatgttatacatattgcatcaaacattataaacccaggaatgcactgctttaattatttttttatacactttttttttttgagaccgagtttcactcttattgcgcaggctggagcgcaatggcgcgatctcggctcactgcaacctctgcctcccgagttcaagcgattctcctgcctcagcctccctcgtagctgggattacaggcatgcgccaccacgcccagctaattttgtatttttagtagagatggggtttctccatgttggtcaggctggtctcgaactcccaacctcaggtgatccacctgcctcagcctcccaaagtgccagccctattacaagcgtgttaattttatcgtgagaagaagctgttactcttactgggggttcccttgtaagtgacaaggcattttcttttttctgctttcaatttttttccttgtccttggctgtcagtattcttaccaagatgtgtctgtgtgtgtgtgtgtctgtgttcattctacttgaagttcattcagcttcttggataggtattttattgtttttcaataaacttaggaagttttaagccactgtttattagaacaatttttctgtttctttctctttcctctccttctgccattcctattgttttgcttaatggtgttccacatttctctagggctctacttattttttcatctttgttctttccccccattctttggattgcattatttctattttcttttctttttcttttttttttttttttttttttgagatggagtctcgctctgtcacccaggctagagtgcagtggcgcaatctcggctcactgcgttcaagtgattctcctgcctcagccccctgagtagctgggactacacgtgtgccaccatgcctggctaagttttgtatttttagtagaggtggggtttcaccatgttagccaggatggcctcgatctccagacctcatgatccgcctgctttggcctcccaaagtgctgggattacaggcgtgagccaccacacccagccttatttctactttcaagtttgctaattcttctgtcaattcaaatctactattgagcttctctagtatatttttttcatttcggttattatacttttagctctcgatttccatttggttttattttataatgtctaactttttagcgatattttttatttgaccatacctttcctttccttttttaaaaaaatgggtttcctttagttatttgaacagatttataatggctactttgaaggctttgtgtgctcagtctgacatctggttgctttcactggacgtttctgttgcccgctttttttccagtgtaagggtaacatttcgtttcttccagaacccatagcacttctctttcctaactagcattgtccagtaaaacacctgtagtgatagaaatgtttatatctgccctgtccaatgtaatagccactagccacatgtggctattgagcacttgcaatgtggctagtgtaactaagaaagtgaattttaaattttatttcatttcgattaagcataaatagccatatttaacttcaagaagataagtggctatcttcttgaacaatgcaattgtaggccatgctcagagtaccaattccttagaattccctactcaaatgttcccaaacctgcttccagcaactgtttgggcctcttcctagtccatcttctacctgacacccagaacagatcatgctggtacgcacaccccaaacccaaggggtaggcaagaggtgatgtggggtacatgcaccaagctccaatgtgcaggcttggtatccacatacatgcatgaataactccttaggggtacaggacatcaacaaggaaggcaagagaagggagtaagctatagatagggcgcctccatttgtactctttgtccaggatccacaaatgctagagatgtctttgactggtaatgtcccatttcttagctatgtgatggctacatgtgtgttcactgtataattttttgactctatttatatgtacaaatgtgcacgtgtgtatgtgtataggtatacacatatatgctatatttcacaattctttaaaatgattaaaaaatttttaccactattaggataaagtcctagctcgttccatgatatataaagccttgtacaaaccatcttctgcctatcttggacctgatctcctgccattctccctctctcctgtcacctctagtcacactgacctttttgctccagccaacagtgccaagttacagagctgtttgttggaggaggtttaattggccctgcatttaaaaccatttgtattagtgaggcaaagaaatgcctgcgatgggggttgcatgaggactggaatgagcagccacagtgtcagaagtgatgtggcaactgcagcctcccagagtttaggaggaaagacatctgcttatataagaaagctggagacagttctgaaggctgccaaaaaaggaacacttgcaactgaaggaaccatcaatcaggtgccctgaacaggtggaggctggggctactctcagcggaaagccaggctcagagctccaattaccagccatgaggaatccaactatcaaaactgatgccagaggggagggagaggaggagacagaggcctgactcagcggaaagagcgattccagagcacctgaggtaactgacgaaccaccagagaggagttggagatcaataacagaaatatctaactcagtggttctcaaagccagatccccagaccagcagcatcagcttgaccagggagctggttagaagtgcacattctcaggcccccccttggtaagaatcagaaactctaaggcacagggagggaccagtaatccctgttttaagaagccctccaaggtggcttttccaatgttggataaattctgagagccataaatctaactttaattgagcgtggactatgtaccaggcgctattctgagtgtttgcctctattaactgaatattccacataatggcatcatgaaatagaaggtgaaccattttacagatgggagctgtgagacaggataatttatgtaacttacctaaaatcagagagccagacagagggagagatgcaatctgaacctcaagagcatgtgctcttccttcaccactgggctctactgcagtgttgctcagaccttagcacacaactcctggggggcttctgaaaacactcctgctggaaccccttggtagagtctgtgattcactagaattggggctgagaatttgcatttctcacaaggccagatgattcggaggctcctggtccaatttcactctaggagaaccattgtgccatgttttaccaccttccccacctgaggatttagtccagcaaatggaaatgttgattgaggctttttgagaaaatccatgtgcagagccccttgccgggactcttttggctacaaatgacagaaaaccctgttctaattgtcttaagcaaaaatggtatctataggccacttgaaacagcctaagtctgcctctaggcacagctggacctaaggatccaggaggtattaacagttaggattccctctttttctctccatctctcagctcagctttcctctctgccttcattctgttgtcttcattctcccctcacaatggcccccagcaactctggccttagattccaccaggtagaaacccccaagtaccccttcctattatcccatcagaagtacacgctggctgtcattggccagacatggatcacaggcgcatttctgaacaatcattgtggtcaaggaaatgtaatgttcttattagctaggcctgggttatgggctcacctctaaagagcagaaagtgggctgagctgcactaaaagcacacagatcaagagtagggtagaagaatcgggtgctggggccaaaaaaggaaatgaatgttgagcaggcaaatataaccaatgtccactacaccatcctcaaaggacaaaatgtgttcaacattaaactctcaaaggatgggcccaagcacagagatcatgatcaaagggaaaacccaggccaggtgctgtggctcacacctgtaatcccagcactttgggagcccaaggtgggaggatcacttgaggttcaagaccagcctgggcaacatagtgagaccccgtctctacaaaaaaaaaaaaaaaaaaaaaaaaaaaaggccaggcatggtggctcacacctgtaatcccagcactttgggaggccgaggcaggtggatcatttgaggtcaggagttcgagaccagcctagccaacatggtgaaaccccatctctactaaaaatataaaaaattagctgggcgtggtggcaggtgcctataatcccagctactcaggaggctgaggtgggagaattgcttgaacctgggagacagaggttgtagtgagctgagattgtgccactgcactccaccctgggccacaagaatgaaactctgtctcaaaaaaaaaaaatttttttttttaatttagcgggtgtggtggcacatgcctgtagtcccagctgctagggaggctgaggtgggaggattgcttgagccaaggaatttgaggctgcagtgagctatgatagtgtcactgcacttcaggctttctcttggggtctctcgcgtggctatagtcagatagtgacgggagctggggtcatctcgaaggcttcctcacacacatgtctggcagttgatgctggctgctggccagaatacactcatgtgaaccatccatgcggcctgggcttccttccataccaatttgtttccaagggtgagcatttcaagaaagagaaccaggcagaagctgtgttgcctttttgtgacctggcctcagaagtcacatagtgtcatttctaccatactctcctggttgtcttgatgcctaggatcaagaggagtggttacagactccagctcttggaatgggagtggtacatgatcagaagagcagggggaatgggagacattgattgtcaccgtcctttttgtaaaataatatgccacagggaggcaatgactggaaggaaggcatgcgggggattctggggggctattagtgctgtgttttttaaatctgcatgctgctcacagccagttgcataatttttttctttttgagacagggtcttgctctgttgcccaggctggagtgcagtggtgcaatctcagctcactgcaacatccgcctcgcaggttcaagccattctcgtgcctcagcctcccgagtagctgggactacaggtgtgcaccaccacgtctggcaaacttttgtatttttagtaaagagggggtttcaccatgttggtcaagctggtctcgaattcctggcctcaagtgatctgcccacctcggcctcccaaagtgttgggattacaggtgtgagccactgtgcccaacccagttgcctaatttttaaactacaccacaatgtcatttccagagttccagacttccattaattccttcaaatcttagctttactgtcctctccttcacaaaaccactaatgacatcctacactccctcaataacctctgctctctcagctccatgaggcctagtgatacctctattatagtaaatattaccttaccttaaattgtccaggttatgtgtctaccctccactctaggacagaagtcctcaatttttttttttttttttttttgaggcagagtttcactcttgttgcccaggctgaagtgcaatggcggatctcagctcactgcaacctctgcctcccaggctcaagcaattctcctgcctcagccttcccaagtagctgggattacaggtgcccaccaacacacctggccaattttttgtatttttagtagagacggggtttcaccatgttgaccatggctgttctcgaactcctaacgtcaggtgatctgcccgcctcggcctcccaaaatgctgggattacaggcgtgagtcaccgcgcccggccgtcctcaaagattttttatcacatccatgagctgcatctccgctgtatgtatgtgtgcgtgtacatatatacagatacagtggtaatttacaaactgtacagtattaataggcacaatataaaacatgcgctaagacagaaatgcttaaaggatgagacaaaattggttgtactcacgcctgtaatcccagcactttaggaggccgaggcggacagatcacgaggtcaggagtctgagaccagcctgaccaacatggtgaaaccctgtctctactaaaaatacaaaaaaaattagccgcttgtggtggcacgctgctgtattcccagctactcaggaggctgatgcaggagaatctcttgaacccaggaagcggaggtggcagtgagccgagacggtgccactgcactccagcctgggcaacagagtaagactccatatcaaaaaaaaaaaagtggttgtaaatagactttctaatattttcctgcacctaaaatgtttgtcttgaaaacccccagaaaaccaggaccatcttcagagactattaccatgaccacaaattccacaaggacaggtaacaatctgtcttactcacctcagtatcccagccactgaatgagatgtgaaaatgtattcaattgtacaccaaacatgtattacagaatgggagaaaatatttgcaaactctccatctgacaagggattaataaccagaatataaaaggagctcaaacaactcaataagaaaaaaaaacttataaacttatttaaaaatggccaaaagatctgaatagacatttctcaaaagaagacatacaaatggcaaacaggcacatgaaaaggtgctcaacataactgatcatcagagaaatgcaaatcagaattacaatatcatctcaccccaagtaaaatggctttcatcccaaagacaggcaataacaaatgctagtgaggaggtggagaaaaaggaaccctcgtacacagttggtgagaatgtaaatcagtacagctactacggagaacagtatagacgttcctcagaaaaagtgaaaatagctgggcgcagtggctcatgcctgtaatcccagcactttgggaggctgaggcgagtgggttgcctgaggtcaggagtttaagaccagtctggctaacatggtgaaaccccgtctctactaaaaacacaaaaaaattagctgggcatggtggtgtgtgcctgtaatcccagctactccgggggctgaggcaggggaattgcttgaaccatggagatagaagttgcagtgaacagagatcgcaccacggcactacagccaggcaacagagcgagattccatctcaaaaaaaaaaaaaaaaagaaaaagaaaaagaaaaactgaaaatagaactaccatatgatcctggcagaatcccactgctaggtatatatccacaagaaagaaaatcagtatatggaagagacatctccactcccatgtttgttgcatcattgtttacaagcgcccaaatttggaatcaacctaagtgtccataacagatgaatggataaagaaaacgtggtgcatatacacaatggagtactattcagccataaacaagaatgagatcctgtcatttgcaatgacatggatagaactggaggacattatattaagtgacagaagccaggcacagaaaggcaaacttgacatattttaactcatttgtgggagctaaaatgtaacaactgaactcatggagatagagagtagaaggatagctgccacaggctgggaaaggtagtagaggggagaggaagtggagatagttaatgggtacaaaaatacagttcgacaaaatgagtatctagtatttgataacacaacagggtgactacagtcagaactgatttgttgtacattttagaataactgagggagtacaattggagtgttcataacacaaagaaatgatgaatgcttgaggtgatggatgccccatgtaccctgatgtgattattacacacacacctataccaaaatatctcctggaccccaaaaatatgtacacctactatgtacccacaaaaatggaaaaattaaaaataattttgaaaagcttacttaagaaaaaaacaggtaaaattttcaaagctagaggacatcagagaaaaagtcaggatatagtaaaaaaaaacatgaaacttaagccacttctggccctcccatcagaaagcttgatgccagatgaagattgcagccaagagccctggagagggggtggcaccgtggagagaaagagaagcaagaaaagaaggggtttggtgctaggtagttcttggtgatgagtcataactgactgcaaaaagtcagcgtaaatagacacttggtgaaggccgggcgcggtggcttatgcctctaatcccagcactttgggaggccaaggcaggtggatcacctgaggtcaggagttcgaggccagcctgaccaacatggtaaaaccctatctctactaaaaatacaaaaattagctgggtgtggtggcgggcacctgtaatcccagctacttgggaggctgagacacgagaatcgcttgaacccaggaggtggaggttgcagtgactgttaaaaaaaaaaaatagatccctggcggggcacacatactgctcctcccatcaagggatggttggcataccttggcttgaatccaggttgcccttagtgacttacttgaccaatataattcagaggaagtggcattctgggacttccgaggctagagcataagatgtgtggcttctgattgagctttttggaaagctcagtcttggaatgctccctctcggaacccagtcatcacactgtgagaggcccaagtcacctggagaggttatgtctggcattccaggccacagccagcatcagcttccagccatgtgagtgagccatcttgaccttcagagtggggcctttagataactgtggtcccagctgatatccaactgcaatggcatgagaaccgcccagctgagcctagtcaacctggagaaccatgagtgataataattaagttgttttcaacagcaaaatttggtgtagcagtagataacttaaaccgtgggctgcctccaacagcttctgtaaatatcgacaactttctcctgatcttaaatgtatgactgcaatgttggaaatctcttaaaagtgatgggtggaaacagcagtgtgtctgggcacagaaggcttccaatggatggcaagaccaagcatgataatctgtggtctcttttagagcccactcggtaaaatgggggacctggaaccaacctcgcagggatgttgtaaggattcatgcagttaaagcctgcaacgcaggtcctgatgcatagtaggtgcctcctaaaatgttagttttaacgtgtgtatcatgtggatcactagttaacatgtgtttgactgcagctaaatggccccaaatcagcagtgcagtggctcacacctgtaacccaacactctgggaggccgaggcgggtggatcacctgaggtccggagttcaagaccagcctggccaacgtgaggaaaccccatctctacttaaaaaaaaaatacaaaaagttagccaggcatggtgttgcatgcctataatcccagctgctcgtgaggctgaggtaggagaatcgcttgaacccaggaggcagaggttgcagtgagccaagatcatgccactgcactccagcctgggcaacaagagcaaaactccgtctaaaaaaaaaaaaaaaaaccaaaaggggctgaacaaaaaaggaactgcattgtttcacatagcaagaaaagcagaggtgggttccagggttgttaaattcattaatttatctattcaaacattttagttctacttcagtaaaaattttatttaaaaatacatgagtaccaacccattgtcaggcactgttccaggatctggagatatagcatagaagaaagcaaagtcccttaggtggttcagtgacattatcaagaacttaggtcctttgtcttttctgcactgccatcttcagcatgacacctgcatcaccagatggtggccaccgccccggcatcacccgcttacacggcatttccagggacagaacagggagtctgctctagcctctctctctttttgtgattcaactttattgagatataatttacatgcaataaaatatatccactttaagtataaaatgcaataaatcccaaaagtttccctcatcccttgtgattttaagatacagttttatcacatatttttgtatgcttaaaaatgtttccttttgcttggctttgagctttataaatagtatcatcctatatggagtcttttgttttattcacattatgtttctgtaattcttttttttttttcttttttttttttttttgagacagactctcaccctcttgcccaggctggagtgcagtgtccaggatcatagctcactgcatcctcgacctccaggcctcaagcgaccctcccacttcagcctcccgagtagttggagctacaagcacacgccactgagcccagctaatttttgcattttttgtagaaatagggtttcaccatgttccccaggctggtcttgaacttctggcctcaagcaatcctcccgtctcagcctcccaaagtgctgggattacaagcaggagccaccatgcccagcctaaattcatctttttcttgtacatctgttgttccttcattttcactgctgtgtaattgtccgtcatgtgagatatactaaaatttatcaattctcctttaaatggacatcagatgtgtttctttttgctatcagataaatgctttacaaaagcatacaaaagttgacagatgaactttgtatacttgatcttagccaaaggctgagaagagatactatgaactttaacatctcaatcgatgcatgtggtcaaatatctcttcttgggtaaggacctaggagtgccaagcatatgggattcagattttcaatttggttcagtttttcaaaataacaacaaactacttcccagagggttgtactaatttgaactcccatcagcaacatatgagatgtcctgtgaatccccatcctcacctacagccatcttaacttttgtcaatttgaggctgtgaaacagaattttagtgtggcctttttttctttagatgttccatataattaggggctggcttttagtcagatggctgggaccaaacgattgaggaggaagggaatttagagggtgactgtaatgatgaatctataattggtaggggacagtgggcagggtgggatggaaaaaggagagccatgatggacagggagagtgtgggaacgtggcctggaggttgcgctggaagcagaggtggtacttgaacaagcaagctggaaggagaggaagtggatttcagtttcctgatctttgtcttgctctgattagggatgagttggaacatcttttcatgtcaattacaaaactactgaagcaaccaaagaatctcaaaggaaaagaccgacagactatttttaaaattactttatttaaagcaatgtttctatgcaatttaaataaaagaaatctctggagaaaaaaaaaatctctttatcacaatctatgttgtacccaaaactgatataacttaacaaagaaaagaccaagcccccgttcaggaatgtgccattggtaaagggcaaatcctgagaggagctacagggtagctcagagacaggtgggcagagcaattctacagaaggcagatgtgatccatggcatggctactgcacgcccagcaggagtcgaagcagcaggagatgctgtgctggtggctgggccatcaaaatgaggcctctgaggctggcttcacagtccagttgtgaaatgtgcacgacccacatctcacgtgtcatttattaatgcagtatattcactgactgtgtgccaggctctgcagataatgtggcaaccaagatagactctgcccccatgctcatggatttattgtccaaagatgagacagacgcagagatgctgacatcacagctggtcaaggtgggacaggggagaggcagacagatgggtcaaggctgggatgggagaaaccccaggagctgtggaagctcagaacgggccccccacccaccctgggggaccaagggggcttcctaaaggagacacctttactgagacctgaacagtgtatggaattagttgtggggaggtgggtgaaagaagggtgctccaaaaagagggagaagcacgtacaaatgcccacaggtgacagggagtcgggagtgttctagaccagcatgatccaacagaagagtaacacgagccatacatgtgagctgcaaagctaattaaacattttctaatagcccaattaaaaaaaccataaaattaattgtaattttaataatatattttatttaactcaatatatccaaaatattaccatatcagtatgtgatcaatataaaacattttttttgtaccaagtctttaactctggtgggtatttatgcttaaaatatatctcaagtcacacgagccacatttcaagtgcccaggagccacatgtggccagtggctcctgtactgtactgaagagcagggcaacacctttgctactcaaagccttggcatcatttgggagcttgaaatgcagaatctcaggccccttcctcaacccaccgaagcggaatctacattcaaaatcccagatgcacatcagagtttgagagaaatgggtccagttctgcctaaaatacttctgtggcttcctactgccctcatgataaatgtccagctattgaggttggcaatcattcattcactccttcatttactcattcattcagcgcatggttactgagcacctactgagtgccaggccctgtgctgggtgatgttgaggactcaccgacggtacagacagacctgattctgaccctgctggaactcccagacagttaataaatgagtagccaaatcactgtttcatttggactatgtgaaacataatatgcttaatgtgaatttgcagtgtacaaggagtgtcagggaaggtctgacccgatttgagtggaaagggatccagaaaaataacccaaataagggaagaggccaccaccatggcgaaaggccacaagcagattaaatgtcctattgcagaggacaggattgccaagcaactccagcccattcatggtcattaagaaggatcgttttcaggcttcagagaaatgtggagaaacgcctggagtatagggttacagaaaatgagccagggacagagctggtgcggtgatatcaccccatgcacagacttgtctgaatttggaaaatgaggagaaaggaggggatcagagaatcaggaagatgggcaatttgtcagtagggaatgacttggggcaagaaattgcaggttatctttttttaggaaaatttaaaaatcccttaacaaaacatatctagatttgctttaaaaataactgaggccgggcacggtggctcacaactgtaatcccagcactttgggaggctgaggcaggcggatcatgaggtcaggagttcaagactagtctggccaacatagtgaaactgtctctactaaaaatacaaaaaaattagccaggtgtggtggtgtgcgcctgtaatcccagctactcaggaggcaggagaattgtgtgaacctgggaggcggaggttgcagtgagcagaaatcgtgccattgcactccagcccgggcaacagtgtgagactctgtctataaataaataaataaataaataaataaataaataaatctgagcagcagaaaaagatgtgcaaggtatggattaagcaacagtggccatatgctggtaactgcagaagctagtgatgagaacgtaggagttcatcagcctcttctctatgctcttatgtatgtttgaaattttcccttaaaataagttaaaagtgttttactttttcttcttctttttagagatagagtcttgctctgtcacccaggctggagtgcagtggcacgatcactgcctagttcactgcagcttcaacctcctgggcttaagcgatcctcctgcctcagcctcccaagtagctgggacaacaggcttgcaccaccatgcccagcaatttttttagttattgtagagaaaggggtctcactatgctgcccaggccagtcttaactcctgaccccaagcaatccttctgccctgacctcccaaagtgctgggattccaggaatgagtcatggtgcccagcattttaaaaatgtttttctttacaaataattggtgatgttgaaaggtttctagtcgctggaaaagaaagcaatttaagcccctcttccaaaggaagaaactgtaagatcagaaatatgagtttctcctttcagaatagagtcaaggaggaaggtggttaaaggcacacatgatagaactgagactcctaggttcaaatcctgttgcaggcacttactagctatggaacctgaagtaactgatttaaactctaaatgcctcactgaaaacctgggataataacagtagctacctcctaaggggtatgtgaggattactggatgtatgcaagctgggggtttagaagagtgcctggcatgaagaaggcaccatacaaatgtgggcagttactgtgaaagcctatgctagccaggcttagaactgcaaaatgtcccaaagcacatccgctaatagtctctctttcttttttttttttttttttttttgtagagacagagtcttgctgtcacccaggctggagtgctggagtgcagtggtgcgatctcggctcactacaaccttgacctcccgagttcaagcaattctcctgcctcagcctcctgagtagctgggactacaggtgcacgccaccatgcccggctaatttcttttgtattttagtagagacggggtttcaccatgttgcccaggctggtctcaaactcctgagctcaagcaatccgcctgcctcggcctcccaaagtgctaggattacaggcatgagccaccgttcccagcccactaatagtctctttactgaactcactgtgccaacagccactgatatcagagtggaagaattctcccaatgccagtattaataatctagttaacttccctcttgcacatacaaaatccttttatacaattcagttgttctaaatgcttgtgagacattttttagataccttgtaagtcatgtttataaggataattgtgataattaatatagaagattctcttaatcaatgtgactcaaaaggaagcttacaagtgatccttaaaatttcactctggtgtgacaaccctagtgtaaagagaaatgagcctcagttttcttcctactgctgtagattttttaaagtaataaagtgattcctgaaagttgttttcatcttaagctgacacataatgtgatttattttcctgtttacttttccccctacaacaggtttaattgcgttaaatggtgagatgggaggccaagagcccagggaggaggacaggcagagacaaggtgggagaggaccgggttggaccaaggcagagtggaaaatgggagaagggagaagatgtgagagatgtccagcagtcccagaggacaagccctggaagctgatgggctggacggggggcagggatgggagggaggcattcagaatgaggcccatggctccctctgagaacctggagcctggaggggccacccctgagacaaaggctgagagagcatgtttggaatctgggacatggtgagtgttaagggcccaaggattgcccagttgggattgggggattgtccatgaggcctccggatcctccaggtctagggctcagagtagaggtcagggctaaggacagagtgtgtcatctgcacagagataggaaacagaccatgaaagagggtaaggtggccccaaggtgagaagagagaacatagccccaccacatttaacagactggtgaaaacagaggagcccgcaaggaagcaaaacgtagaggaaatgtcaggggatagcagactcacagaaactaaggggagggtgtgctcacagaaggcaggcagggtcaccacagccgatttttgccaagatgaccaataagatgagcaccaaaaagagcccactgagccaggcttctcactggcagaggaaggagttataaagaaagcaagggggggatggtgagaatgaaccctctggtactagactagtgtcagagtatcagtatgaactcatgcttatttttacacaccattctccaatgaaaagaaccagtgactctagaggaagagctaattctagggctggtgcagggagaatacatgagcctggaatatcttgcagtgccagaaagtaagaaggtgttggagaaaaaaaaaagagtaaagaacacaggagccaacctgaaagataaacgctgatggccaaggctaaaacaacttgagcaaaaaaaaaattgattacaataatgttggggtatgcccaactaataaatattcatgagtccacacggaaataaactaatgattgtataaataaaataagtgaagtatgatagaagggacaaatcttccatatggaattctaaatagtaaatgtaaagaaatgagggaaacagaaagtcatcattataatatcacggtaataactgctacagaccgggtccactgatgaatgctaaaatgtgtgggtaaacttgaaggagaaatgggatatttgtgcagcctccaagtatctccctatttccctccaggaatcaggcttagctctcctctgagtgtgggctggatttagtgacttgcttctaacaaatgagtaaagggaaaatagtggtattatcgttgggaaatctgcagacaccactttcatgaagtgatcaggttaacctcacctcagtgagcattcttcccaaagcctaaaatcccagtctaaccacgagcaaaatgtcagacaacctcagactgagggccattctacaaaaacatctcaccagtactcctcagaactgtcaaggtcatgaaaaacaaggaaggactgagaaattgtcacagattggaggaggccaacgagaaatgaccaacaaatgcaacatggtatcctggattggatcctggaacagaaaaaggacattaatggaaaaacaggagaaataggattcaagtctggagtttaacagaatattaatccatgttaatttctcagttttgacaaatatacaataattatgtaagatgctaacactaggtggaagttgggtgtaggtatagggaagtccctgtatcatctttgcaacttgtctgtaaatctaaaattattaaattttaaaacgttcacaaaactttaagtctcctctgcaatatggctcgaggtggtcccccgcggagttccaaagcacgctttgtttgactcatccttcagatctcatcttacatgctccccacgccaggaagtcccacctgacaccacagactgggtcaggagctgcctctggctcccacagtccccctgtggctcccctatcctggccccaacccctctgcctccccatcccagccctggtcactgtctgccgttggggttgtcttccccactggactgtgagctttgcgagggcaaggtggaggctgtctcagccattgctgtgtctcagccattgctgtgtctctcttgagttgagagtaatgcgtgtctccctgactcctctgggaatacccatgaacaggcagaagctgcgcctgaatcctcccaactgacccttaacgcttcacagcccaaggcctgccagatccaccttcctggtatcccctttcctgtttgctcaatccaggacacatctgaggcaatataaatggtctgtctcacccatcagccaaaagagggtcaaatcatctccaacccctgccacacctgcccacccacatgtccgccctgtacaccaagtgtcagaaacacatggtgactgtgaatgtttggggggcctgcccagtccacagcccttctgagcagacagtcatcactataggaaccctccagctccagtgagttgagcagggttggatacccgaccctggaaatcccattcctatctgggaaattcggaatgaagactgaggggctgcgggtaactgagctggaagatcacatagagtgggggcaagagtccacccaggaccaacccagctgcctgagaacaggaagcagccaatgcaaagagaagcagagaccacagggcccagtggaaaggaggaatgtcacaccactgtctcacttctgcttctattctgttctcatgaagcccttgtcaggttctttccatcactacccacaaccaatcacagtgagttctgccttcaaaatgcacccagactccaatgactactcattctgcccctgccctggtacaggccactgtcatctcacctagattattgcagcaacctcctcacgggcctccctgctctcattctcagcccacacttccatctatacaccctcccttagtgatcccatcctgggctttaataccataaatatgccaactactcccagcccagatctcacccttcaatgccagtcttgtataagctcctgtttggccagtgggtccagtcagaggctaaacacgcccacactctctctcagtcttgtccatacagttaatggcactccctccttcctctgtgcagactaaacgccatagtgtggtccttgactcttctttcttaccctacatacctgattctcccttcaaattatatgcaaaatctgaccacatctccccaccgccccgttagcaccctggccaagccactatcatctcagctggactgcacagtggcctcctcactggcatcctgcttccaccctagtagccacatgggagccagaggaaccctcttaccgtggtagatcacatcgcctcagctcaccatgctctccctgccacacatctcatcagcttcaaattcaagtccttcccatggcctcccggtcccacctgaccttgccttggtctccttccctcccactgtgtccagtcaggtccagttcactcctttctgctcctccagcacaccaagcatgcctcggggcctttgaatttgctggttttttctacctggaatgtccttcttcccagaatatacatacagccagctggtgtcctccctttctgtgaggtccattaacgtttttctcaaagaggtcttctttaacccctctatctaaaatagcacctcttcccactctctagtcttccaaccctcaacttctacagctctgttcactaatattagcattcatcttgcccactggaatgcaggctccaggaggacagggctttcgggggtcttgtttgctactattaataataccagcacctaaaaatgcttggcatgtagtaaatagccagatctgatgactcaacaaataagaaaaccctggaatcagttaggatattgttgattctaagtaatagaaaactcaattcaacaatatagttggcttaaacgatagagatatgttgaattccctaatgagaaagtctagaggtaactcactccaagtgaggcctgatccagcacttcaacaacatcaccaaagactcgatgtctttccatctctctactagtccttccaagaaaatggctaaaatcacatcactaagaagtgggttggctggacgcagtggctcacgcctgtaatctcagcactttgggaggccaaggttggtggatcacttgagcccaggagttcgagagcactctaggaaacatggtgaaaccccatctctacaaaaaatacaaaaattagccaggtgtggtggtgcatgcttgtggtcccaagtactcaggagactgaggcaggaggatcacctgagcccaagaggtctaggctgcagtgactccagccagggtgacagagtcaggccctgtttaaaaacaaaaaaaaagaagaagaagaagaagaaaaagaagtggaagtgggttactaatgtgtttattcatctgaccgccacttcttcaacaattgtgaaaattgtaatgctgatgaacatgatgctgataataatagctatcacatattcagtgctttgtgccaggcgctttactagtactttattagcttctgtgtgccttcatttcctcgtttgtaaaatgggaacagtagtagtaccacatacggtgactgaggattaaatgagctaatacataaaatggtaagatcttaaaaaaatattagcttgtttcagttagctattgctgtgtaacaaagcatcctaagccacaggggcataaaatagcaaccatttctttgctcatgattctgcaatttggacaaggctcaaagggtcaggggatttgagatggttcattcctactccacatggtgtcaactggaatgggagttaggccatcccaagatggcatcacttgcacgcctgcacatcagctaaaagttggaacagccgcgggctggggcagatctatagaaagggcagggctccaagagtagaagcagaatctgccaggtctcttaaagcctaggcctccatttagtacagcatcatcttcattgtatttttttttttttttttttgagaaagagtctcactctgtcacccaggctggagtgcagtggtatgatcttggttcactgcaacctccacctcccgggttcaagtgattctcctgcctcagcctccagagtaggtgggactacaggagtgcaccacacctggctatttttttttttttttttgtatttttagtagagatagggtttctccatgttggtcaggctggtctcgaactcctttcctcaagtgattcacctgcctcagcctcccaaagtgctgggattacaggcatgagccaccgcacccagcctgctttcattgtattctattggtcaaaacaaatctcagggccagctcagatataaggagaaggaaggagactccacctcttgataggaaaaacagcaaagaatgtgtggctgtcttcaatcacagctattttaattccacagtaacagccttgtcactggtctccctactttaatccttaatgccttatagtcaattccccacacagaagccagaggagtcttttaaagtacactttagtgtgaagaattttagaaggaaacacacacacacacatacacacacacacaaacacctgaccacgctcctgtccccagcttaaaattctacaacttcccactacatgtggggtaaacacccaaactccttatggcatacacaaggtctgacctcttgctctgcatcagcctctaggctccaaccatcccaaactcttatctcttaaaggagttaatgcctactccttcatcacctcaaacctcatttcctaggatccggatttgatttcctatcaagtattcttataacactctctacctttcttggtaatttcacacgtgtgattatttgatagtctaaattactgtccctattactgtaggttctataggggtaggggaatattttgttctcttctgtgttcccaatgctgaggagaaagaagaggcaaggtgaaatacttgttgaatatcttgagccctcagaaaactttaaggcagctccttggagttctgtagaaaggggatcggcagagtccccgccatgctgggatccagatatgtgctcttcaatagtttatttgataagtagttactgagccctaactgtgtgccaagcacttttctatgtgttggagataacggaggaagtagacaaaagccccttccctgatgaagtcaacagtctcctagaggtaagggtcaggggagacagaccataaacacagataaattctacagagtgttaaacagtaatatgattaatgctaaggataaagttaaagaagcaaagatagatgtgactataagtcacaaatttagaagggtggtgagggaagatctcaggaaggcagtgacatctcaggagagacctaaagaggaaggaacaagtctgggctatttgatagatgagttctttaggcaaagaaaagagcaagcacaaaggccctcgggccagtgtggctggagcacagggagtaagaagagtagatgatgtcagagaggtgatgagggcagacaatgcagggccttgcagaggactctgggttttaccccgagcaagatgtagccttggaagtgttctgagcgggggagggatatgacctgatacaggtgctcacagcatccctccagctgcatgtaaggaacactctgggggcaggggtgagagcagagagatcactgaggagcctgccataatggtctgtgaaggagataagggtggacaggagtgaaggtggggagaagtggtcaggtatattagctgacagacatgaatataagacagaaagaggagtaaaggacaattccagtggtttgggcctggagaggatggggggagcatttactgagatgaacatgcagggaaaaaattttggggaaaggagcaggagctcaatttgatcaaaattactctggagatacctctagattaccaacaggttatgaggaaggcagccagtcaggagctcaggggagagattctgggatggacatagaaatgtgacacataatgggaggccgaggcaggcagatcacaaggtcaagagatcaagaccatcctggccaacatggtgaaatccagtctccactaaaaatacaaaaattagctgggcatggtggcgtgtgcctgtagtcccagctactcgggaggctgaggcaggagaattgcttgaacccgggaggcggaggttgcagtgagccgagatcacgccactgcactacagcctggagacagagtgagactccgtctaaaaaaaaaaaaaaaaaaaaaaagtgacatatacatttccatgcctctcccaaattcctcacaagacctacgtgatctggccctgctgatgtctccttggtaagttaatggtacgcgcgcacacacacacacacacacacacacacacacacacacacatcctgggccctccccttcctaggtattgataatggtcaagttacctaaacttttctgtcctaggtatcatttacaaatgggagatcacatcagcacctgcctcctaggattgttcattcaagacattagccactgagcatctgctctacgcgctggagatatcccttctccactcctctccgcctccccctcccacacagcctgtcaaccttctggacgtctctcccatcccctcttgccctccctacggtggcccctgccctgatccattcccaacacctcttgcctaggaatctgtcacatctgccaccctgggtttcctgaccccagtcactttcccgttaatctattctcatgtcacagcaaactgggccgtaccccttccctactaaaaatcctcccatggctcttcattgctctcaggacaaaatccaaggtccctaaatgatcaagaaaatcttccacatctcattcatacagaattttcagtatgatcaccaacaccagatcgcctgcagtccatgttcacacaacaggctgtttctctctgcctttgcgcaaaccattccaccacaccgcccccgacccccaaaacatccttccgtcttcaggtctcagctcagacagctcctagtcttccgggatgatcttcctaccaaggtctcctcgggttcccaccgcgttccatgccgcctccattagtgaacatacataggtccgcaacggggtcttgcctgtctctcccactgagcggggcttcccgcaagccgggccaggcacagcggccagtgatgtccgcgtgctggggcctcttcaggcctcggcgtctactgcccgctctggaactgtgagcgacaaccggcactctctcccgggacggcgccgcacccaccttctgcacacctcggagacctcaacacctgcgccaaagccacccagtcacagccttctctccctctcctaaacaccatgaacatccaggccccgggacctcagactgctcattggctgcctgaaaacccgcccccaagcctgagagaaaagaactctggttgctgtagttccccaacgaacaccgcagaaagcgattgctaagtagaacttcatttcccacaaagcgccgagccccagtggtggcagacggtaccctttgaactgggctcttgattggccggttgggagacgtacatttccaaattaccgtggaaacaggaccacttacctggaaccccgggaaaatctttttgtctcagaatctcaaaactctttgtttcgcgatgattccaaagagctggacagtacacgtggggacagagtctgtacctattgtctgcctgttccccagatggcaccaacaaagcctcctaagtgtactcagctgctactggacgcctgcttggcatgaggagccactcttgtgctaagtctgcggacgccccggcttattagggcacctgtttcccagagacaggccagagctgaacctttaccctttcagggtctatttacccaggaaaaggcaaatgtaggccaggatcctgtccacgatctatctagaatgctgatgccccagacctgcagactcatgcctgcaacacgcgccacagcttccccacgagacgtctccacaccagagctcctccagcaccccctccgcaaacccccttccccaccatgcctctgagggtcgggtgaggggagccgaggccctgcaaacgctcaggcaggcatgtgagaaagctctttactgggggtacagcgaggaggagcaaggccatctccccctacctgcccccaccccctcctagggtcctggggtgagggggggtcttccctccaccggaccaccactgtctttggtacaataaatagaaaaaaagggggagaggggcccaagggtccagtccttagtggggagggagcggccaaaaccctctccttgacccccctgccccaggccccaatcagtgcaggcctcacccaccccagctgggtagcagcaattccagtcaaggagagagatgaggatgggagcccagggcccccagatgggggagggtatggcttcaggaggggccccagggagggggcagggtcacgagctggctgctgtgctctggggtacaccacggaggcccaggtgaggccccagagtggcagggtcatcaggaggcgggaggggtggacgacctccagtcatccgagtccggagggctgaggcagccgggtgctggggggcaggcgctgggtgaggtggggagcagtcagcagggccgcccaccaggctcacatccatcagctccgggggtggtggtgaggttggtgatgggggacgaccaaggtatcggggctgggggggtaactgggccccggtcccaggcagtgacgaggcagaggcaggggcttgatgtgtcttgtggggcacatcaccccctgcccagggccgcagcggctgggagggtgggacctaaaaaagcaaaggagccatgggtgatggagaccctggtctctaagccccaggcaccaccacccacctccaaagcccccaaagccccattacctgggggctgttcatctcacagtctgtgatagggggcccagggcccccacaatatcggttgctgtagcggtaggtccggttgtcactggaggagccactggagcctcctggaagtgccagggaggagaggtgaaggggcataaggtgagagaaggtggcgagtgggttttgggatggctgagggaaggtcacggcccaggctcaggttcaggcttcaagagcagagcccatctgaagcaccgggcccaattctgagattctgggttggaattcagttttgggttttagagtcagaaccagtttcagggctctgagcccaatttcagtgattgtgtcagggccagttggagctctcccatcccacacgtcatcttacagttcaggatcagtttcggcgctttgtgtgaagacccagtaaccaggtcccccaggacaggccaaacctgagcagcccccacccgttgtaccccatttgggcacctgggcacccaccagaactggagatggagctggcggtgctggaagaggggcaggtgtcgaggggcgcgggcgaggtggaggcactgctgcctgccgggcccgtgttggtggcctcgtcggccgtgcggcggaagaagccgtgctgcagagcccccagggggctgatgcgggcggcgggctcatactccagcatgcgcagcaccaggtcctggaagcggaggtagtcggcggggctgtggcccggctcccccgcccgccggcccccgggcccgcccgtctgcacgcccagcacctcctgcagccgccgtgtcccggggccctggtaatcctggcagggagggggtgggagggggggcaagagagtggccgtcagtgggcaggaggggcagggagacacacacggggaaacagaggcacaagagagaaagtggaaagaaaagctaagaagagttgtggggtgggaaggagagatgggagatggggtgggcaggggaggaaggaaaggacagacaagggggagtggaaggaagggaaagacacaagggagagggagcagggggagagagccccaagtgtgagtgaggggccacggggtgggaggagtggcatggggcaggggccgcaccttcctgagttctttcgtccttcgtagggtccagccacccccaggcagccgttcaaagtacttgcgagccttgggcgcctggtccagcatggcggccggtgggatgcccagcacctccacaatgcggttcatctggtcgacctgtgagcaggcaggggtcaaggtcatcaggccagccaggctccaccccctccacctccagcacaccccttcctgggggcacacctcattggagccactgaagaggggctctccggtgtgcatctccacaaggatgcagcccagggaccacatgtcaatggccaggtcgtagggtgtgcccaggagcacctcaggtgagcggtagaagcggctctggatatactggtagatctgggaaaagggtaatcgtcaagggacccagcctcccctactggtcccactgacacccccaaagctaagaggacccaactgaggacaggcttcttgctgacaaaatggggactgaggctccaaatcctgccattatcagcaccaattttctgggagccactggtgccatcttgtttatcaatctggggagtctgctggcctagacagaccctgatctccacccccaacccggatcctgggcccttctgggtcaccaggcagaggctgacattccataagccctataccatcgtcacttttagtggcagctcatacagagctgcaaagttgaagccttccacctccatcctcagctttaagaacagagaagacaaaaacttagcgaggcagcacccctggctcaaacccaacccaacttcaccctgttcacatctggcagcttcaaaatgggccctgcccctcaggcttcacccttcccatcctagtgggcagtatattcacacccccaccccaagcattatccctcagttcccacggctcctaataatcccatcccagccaagccccgcccctaagcctcccgttggctctgccccacccaaactactagccgtgctcccaggaccgggccgccccctaccctctggccaagctggcaggagctgccgaagtccacaatcttgatggcgctgcgcttggggttgcacagcaagatgttttcgggcttgaggtcgcagtgaatgatgctgagctcaggcgtggccagaaagagcagtgccgtgcagagctgctgcgccagcttccgggtcaggttcagcgagacgccgcggaagtgggtgttgcgcaggaggtcgtacaggttgtaggacagcagctcaaataccaggcacaggtggttccggaacatgaagtgccgcttcaggtgtactgcgggggaggggaggaaatgggccagagaagaaacggctcagagagggcaggtggtggcctggggtcatacaacgctctttgattactagccacattgtgctgtccccacgggtaccatctgctagtcaaaatctttttatctaacaactagattcacacaggaagttaatgctctttccaagtctctgtcaaaccctccaattaaaccaaagagaaagtttcattagttactactagctctaacacattctacacttcctcatttaatttcataacactgctttcatctcccttgtattcatttttgtggcaaaggacactggttttccgtttactttaaggatatacgttttcctttcaaacgaaaccattttaaaatccacttgctgtttatgattatgttgtgatgtttatgtccatgagcaggaatcagtttaagggaggagaaagactggcacagatgttaagagtaacagctctggagtccacgacctcatcaaattatagctcaattagtacaaactgccacctcatgcaagtgacagcacttgaatgcctgagtttcttttttcctttcttcgtttttttttgttgttgttgtaactgttgttgttgttattaggtttggttttttgtttgttttgggtttttttttttttgagatggagtctcgctctgtcatcaggctggagtgcagtggcgtggtcccagctcactgtaacctccgcctcccaggttcaagcgattctcctgcctcagcctcctgagtagctgggactacaggcgcgcaccaccacatcaagctaattttttcacatttttagtagagacggggtttcaccatgttggccaggatggtctcgatctcttgatatcatgatccgcccacctcggcctccaaaagtgctgggattacaggcgtgagccactgtgcccagcccgttttgtttgttttattgaagaagaaactaggatggaagcccaggtttcttatcttcaagatgttgttaataatgcccttccccttatgggctgtggtgagttaacttccaagtgcttccaagagagcctggcccttggtgagcactcagtaacctctgaccattaccaagaaaataggacaaaaatcataaaagcagcaggagaatcactgatgtcagagaagcacagaccaaaccctgctctgaagacatcagcctcctcctgagagtagggcgggggtgtgacccatccctactggctccagctcccgctatcccaggtgcccacagccctgccagtcccaggcctcacctatatagtacttcatctccgtgtcatgctggttcatcagctccagcagccgcagctcaatctgggcctggttcaggaaagcctttttgttcttgatgatcttgatggccacaagctcctgggtctgatgatcataggctttcaccacctgttggggcagggcatgtcacgaagaaaggggtgggagcagggcagagccaggcaccattcttctccctccaggcaaggagacccaccaagaacactatgcatacttcgcagctgagtgcgcaccattagtcaggcgctggtgtaaacactggatgtgaaataacataacgaccttatgttgagtcttgttatttaaactgttttacagaaaaggcgactgaggcacagggaaactaagtgggctagggtgagtggcccagcatgggacttgaagccactgaaccactgggtgtgtgatcaatgttagtggggccttggatcagggtggtggggggtgtcccacacctggccaaaggagcctttgccaatgagcgagtcaatttcgtagcgctccagccagcgctcgccactgcgcacgatgtagtcatggttgtcgtcatcataaccatggttcaggaccttcttctccttcttgttgctcgaatcctggggtggcgcctgctgggcccgccgcttcttcttcgcatagtatacctgcccagccagccagccaggagatggggactggtgagtgactcatgccagcagacaagaccctcggcacccagcccaggatcccccagcccctgcccacctcattgatgtgcttgtaggtcttgatgaggtccacagagagcttacgcagcggggctgaggttgcatcccggaaggccaggggcagcctccgaggcagtagccgcacatcaggcaatacctgcagggcagggtgaggggtgggcactgaggacgtgccttcacctccgacctcaagaggaagaactgtaagggctgctggcacatcatgtatttggttgctgtctgtatttgttccacctgtctaggaaagaaactcccccagggctgagactttctcttgttcttactatacctccagtgcctacagcagggcctggcacacaatggatgctcttagagatctgtggtgtgaatgagtgaactctgacctttcacccctcacctttactcctttctgaacctcagagggagagatcatatggaaaacctgggctctgttcctccccattcttcactttgaagccagccattttgggtaccctctgaagtacctctatctcaatttaccctcatcccttgggcctcaacccatactcccaccaactctttgcacagttctttcaccccaaggctcttggatctggatctggcccctggacctcccacttcatcctgcttcaagctctgcatgtcactgccttcactgcctctagccttgggagagctttgccctcaccacccatgcctgttggcctcaagaccctttagactcaacccccctccaaattcacccaatccagatctttcactctgaacttttcttagtagcatttattgggtatttactatgtgccaggcaccattctaagtgttttacatgcataccattaactcatttaatcctcacaacaaccctgtgaagtaggtatcattattggccccatttcacagaatgagttgagttctccaactcaagtatggagaacctaaggaatttaaccactgggtcaggatttgaacccagcctctccaaaccctgactctgcctgaaaactcctctgttattttccaatcccatgggacccattatgtgcccagaagaatgtcttgggcaaccacactaccttttggtctggagacctttctatccccagcctccccctaccaccacgcaggtgaggagccagctgaacgcgtacctgcgtgtgctcctggggccctgggaagccagagaagggaccatggcccggtgggacggccatggtgggctcagagggccgcaggggagcgaggcctggagcgggagcccggccggggggcgccttcttgcatcctgcacctcggctgccaccgccgctgagacctgagagcagacaggaagtgggaaaacaacatggaacaaggggatatgtgaatagtgccaggcggggaagagtggacatgagaaagacagggcacagagagaagaggaaaagggcacaacggagcagcagatagcaatgaagagaaggggcagagaagtggtagccaggtggggggggatggcacagcagtccctcgacaaataatgatcaagtaaatgattaaggcagcacaaagagaacacataaaagacaatgattgggggccaagcaggggtcgatatgagccatcacagggaaaggaggacaggaagacaccaataattcagaggaggaaaagaaaaaagaaaccacagacagtatgcagaggagtaggcttcattcttttctcactactcgtggccctccccagggcccctaacacaagatgccactttctgtagtcttccctgaacatcaggatctcagcccgtagcacagccagggccaatactttaagatctatccttctcagtagattccctcaacccagagaactctaggattcccaaaccacatgagtcttcccctcccaaaccacagcagagtcctctgcagccctaaaaccacatcagcgtccttggggacctcccaaccacaccaaagttatctgagaacctctatagaacagagtcctatctctacagcattctcatccaccagggcacgattttcctaggggaccctctccatatcatgccaagaccgcttccctatttcaggtcctccatattaggaaccagccttccaggtagtctccctgtaccatatcccaattccccctaccacaacagggttcttccccatattactccaatatcccatcccaatcaaggcccactcctcctgatgggagaaggaggaggtgtctcttcccacagtttagagtgatcatccttttctcccctacactgcttccttgcccccctacacacacacacacaccctaatattcctaccacagacctttctccaggcacccctctttataccagggtcattccacaactgtgtccactcctagagggcctcaaagtcaaatccccaagttatcacatagggttctctcctcccagagttgtcagctacagcaaaaatcttctccccatgggccactctctcccccatgtcaaatccctttctcctattccatgccttgccactccacgactcctccacccttggagcttcccccaaaaaaccacctcttctccggggccctcccacaccaggatcatctctcccagcccccaccccctacccgggtcagggctggcgcggggcccacggggggctggggcgcggtggggcccccagtggggtgggcgagcggccagcatggcggcggtggcggcgctgaaaaggcgaccgcctgtctctggcccggccggccccgcggcggggagggcaagcgggacaggaggcccggtgggtgacaacagcagccgccactgccaccgggggcggggagaggaggggacaagggtcagcccagggcacgcgggggaagagtagagcaggtggacgggggaggggcgacacgccccaccctgagtgaccaccagcccctagggacccggcgtcccgccccccacccaggaggccctcctgggcctgctgagaccggaaggcggggcccgactgagcttggcaatcggcacctgccatggcaacaactgtaccattggtcgctggtgccaagagctcagccaatcacagcctagggcagctgttgctaggcgacgaagaagcggcccgcggagctgagcccaaacaaagggcgggagtggggcccggctaccccctcccagcctccctcctgcaactgcttcctcgggcttggccggttccaggaattcaactatgaatagccaggcagggcccgcacctgcctgccacccccctcctctcctcccttggcctcgtgctaagtctcacggcgacgggagcagggcggatcccgtcctgcccacctccctgcgaccgcttgccgccccacccgtccccgcgccgttacctgaaggagcgggcaaggggactcaaactgctcggggagcccgagctcagacctgcccactggctgagggtatccggcggacgcggcaagccagggccccgattacccagtaatgcaaccagcaaaatggcgaccacaacaaaccggcccccccacgccctggactccgcccccatccctccctctccgctcccctcacgtgacccacactgacactccgcctgcgcgagatggccgcttacctgcacgcatgcgcagcgagctaccaatcccacccaagaaccgaaatccaggctgccgctgcgcaaaggcagctagaaacggagcatgcgctctgtgaccgagtgagaatttacccaaccccgcaaaattgaccaagggtgcgtgctccctgtgtcagcaggtcaaggggaggaatgagcagcagacatgggagacggatgagtcttttaatagaaaaacacacgtgcaacagtatcaacacacatctctcgcaatcctgacagcgctgaacttcagttcttcaccttggggggtggcctgtgagaggaagataggtgatgaaggagggtccccaggatcatggcactcggggtgcaagggacagagatgtctgtcttggtgtattgctgggcccctgctcacctgtacactcccacgaccacggcatggtctctttcatatggctcaagggtcaactgctcctgcggcttcatgttctcctgttgcatctttttcacttcggaggcaaacacggcctcggctgaggctgtggagtcaatgcagttggcctaaagaggagaaaggactaatgtctacaacagggctttgggctgtttttctcttgtgtgctctttaaaccagatgttttcattattaattcaagtaaaactcagtgctatggttctagtgtgtcccccaaagttcatgtgttggaaacgtaacccttaaatgcaagagttgagaggtgggaccttcgagagatgattcaggtcatgaggcctctgccttcctgaatagagtaatgctattatcacaagagtgggttgctgattaaaaggatgattatgccccctttctatcttgctctcacccttctgccaatggatgacagcaagaaggccctcgccagattcagacctccaatcttggactttccagcctttggaactgggagccaaataaatttccattcattataaattacccagtctaaggctgggcgtggtggctcacgcctgtaatcccagcactttgggaggccgaggtggctcaatcacgaaatcaggagattgagaccatcctggccaacacggtgaaaccctatctctactaaaaatacaaaaattagtcgggtgtggtggcgcacacctgtagtcccacctactcgggaagctgacgcaggagaatcgcttgaacccaggaactggaggttgcagtgagccgagatcgtaccactgcactccaacctggtgacagagtaagactccatctcaaaaaaataaaaataaaaataaaaataaataaattacccagtctatagcattctgtgatagctgcataaaatgggctaagacactcgggtttaggaaatgtgataaaaggcttaatgaaagtttttggctgggtgcagtggctcgtgcctgtaatcctagcactttgggagcctgagacaggcagattgcctgagctcaggagctccagagcagcctgagcaacatggcaaaaccccgtctccactaaaaatataaaagttagccaggtgtggtggcacacgcctgtagtcccagctacttaggaggctgaggcagaagaattgcttgaacctgggaggcagaggttgcagtgagctgagattgcaccacttcacgccagccttggtgacagagcgagactctgtctcaaattaaaaaaaaaaaaagtttttagttttgttttggatttgaagcaggaagccttaaacagtcctatttatctaaaagccagtgcttaaattttatacccaggaattgtttggcttatttctacttcctcttctttaataatagtaataatgcagttgagaataataaaacaaatgtagcaaaaggctaacaaatggtgaaccttgtgaagggtgcatgggagagttctccattatttccaaataaaaatgctgtgaaagatgcacctagcttttatctagtatctattctatgccaggatcttttctaaacacttcatattatattgactaatttgatcctgtcatctaccctgaaaaagactagacaatatttctatttcataagtgaggaaactgaggcatataggttaagtaacttgctcagtcacacagcaggctgggattaaactcagatggtcagactcaattttgcacttgaccgctgcactctcctgcctctttaaatccaaagctatagttttgcagacttggcccctctgttttgggtggctatttgacagatacagatagagaagatacctccctagaacactgccaccccatcttagactcttccaaaccccgcaccttaatggaaatcacaaagtgtcctccattacgcaggaaggtgtgggcattcagggccacaatccgggtctggtctggctgggccacatcagcaaagatcacatccaccattgctaaggagaaaggagcagcagttaaaagttggagtcacagggatcaccccagatcctcccatggggcctatgcccatcaccagcaggttcctgggagattctccctgcctccagtttcactccccacctccactggtccccctccctccagtgtcccaagatgagtccaaaacccacagtcacatcattcatccactcttcttgtaaaccatggttgccacctactctgtggccagccctgggccgggcgtgggggacatagagacgagtcagacccggaccctgccctcgagacgctcccaggtctggtggggagacagacacgtcatcaaaaagacaagtaagagtgagtgagcacttataggcaagagtgtccgcaggactgtgaaatgaaaacaagttgcagaacaaaggggatggtatgagtgcatgggaaaaataaaacacagaaagaaaaaggagcagaatgaaaaataatgtttttaagccagtgtgacttttcaaaaaatgaaaaggtggtataatgaaaactgattatttaaaacctgggaaaagcagacatcaaattgttctcatcagttacttctggcggtggtttataaggcttttcaacttttatattatatctttgaatgtttttttaaacaaagtaattaatattcacagtgggcccctccagatcaagccatgcttagttttctgggatatgctctcaccagacaatgattaggacccccaaaaggaggctttttatggaggggtagtgtaataaatacaagaggcaggaagtacaggagacctaggagatggggaggagactgaaggagaagaggttggccctccaagggtggcttccaagactctgaagccaagctgccacctccacaacctcacctagctccccttacccctttctattcctgcagactcaagaggtctgctcatccactccaactccatccgaatcagagatccactggcttcttccagaagcctgcggtggcctgtcctaccccaccggggccacccccagacccctcaccgatgagcatgcggtatttgtgtgggtgtcgagcatcctcgatcacaggaatgatgttggtcctcttcttggccaagttaatgaggtcacggccagagcggtgggagaactcgactgcatagactagaccatcctaaaataaattaaaaattaatgaacagtgatgctagttctcatgcatggagtgcctactttaggcccatacactatacacagcatctcttccaacccccaaatcaaaaccctaccatctaatgactattgctatcatgtccatttttcacatgaataaactgaggtccagacataaagtcactggccaagagttattcagcaagtagcaaaagtacccaatcccatctgcctgagagcccaggttcccaacagaggcttaaaaccaggaagccaaggcacagagatgatgtaacaatgggccaaccactgctctaagcacctttcagaaattaactcatttaatcttcacaagtctatgttccagacaggtaaactgaggcttggatgggttaggtaacttgcctgattaaagcctgaggttttttttttttttttttttgagtctcactctgttgcccaggatggagtgcagttgtgcgatctcagcttagtgcaacgtccgcctcctgggttcaagcaattctcctgtctcagcctcccaagtaggtgggactacaggcacacgtcaccacacccagctaatttttgtatttttagtagagatggggttttaccatattggtcaggctggtctcgaactcctgacctcaggtgatccacctgcctcggcctccgaaagtgttgagattaaaggcatgagccacctcgtctggccaaagcctgaggttttaaggcactacacttaacagcttataaacacataaagtaacaaagggtaacagagtgggacacgtgggtgccaggggccctctaaatgggaagcctatacaggctcagaaaccatgaagatctcctggttctttctaaagaaaccagaagagcaggttttagcagcataaaattttaaagaggcccatcaaatcaaatagtctggtatctatactccccgttgtctctctaaggttggtcaccccacacccacgtctcttcccttgaggccaagaacccaggagtgaggttgaatgacattatctggttcaagccactccttttactcacaggcacagtgacagaaaagggcctggccctaagtcacacagcgcaggcaagcagtcaaaccctgatattccaggttggcagaagggaggcagcctttacctcctgcctgactctccatctactcactcaccggaccaacgatgtcagagacatgggagaccgtggtgcccgaggcagccccgaggtagagaaccttagcccccggtttgatgtggatctggtccacaccacccaggattgctgctgctagcttggagcggaaggggttccaggctcggtactcaattttgtcatctccttcctagatgagagatggggacagaagtcagtgctaggctcttctgcaggacctcactgcctttaaccctaggagccttgaaaggaactgggctgtcctatcactgcacaagaactcaacatgagtaaagagcagtgaccatgcacatgcagtcgctgccctctcatggaggtgactgacccaaagggcagcaaaagagaataaacacaaacagtaacagtaaaaccagcacttgttcaacaaacatgcactgtgccagcacctactgtgtgccagaccctgctctaggcgctggggatacaaaacaaggatccctgcccagaaggtgtaagtattcaccgaactaactaaatacaacatggcatatgagatggtgacaggtgttaaggagagaagacaaagccaggagagaagatacggagtttgggaagcagggcaaggagcaggtgaaaatgggaaaaggggccagggaggggctgaaaggcagattccaaatcagacctgaaggaggcaaggggccattcaagttatctgaggaaggacattcccacgagagggagagcgattaggaaggccccaaggcaggcacaccctggcctcaaagaaaatgacacaggataacaggacaggggagggcggtgagggatgccttgacccgcagagtggtgtgacgcagcctggagaagcagatgataaggacgcagcctcccacagagctgggagtgggaacagcaaggccagggtggctggaggacacttggtcagagagttagtgaaggagacaaagccagggggcagggagggggaactggaatgcacagggtcttggaggcctgagtgaagactcaggagtctaactggaaggccgtggggagtcacagaaggcggatgagggagcagacagtgtggtttacatattatgacaatcctccagctgtcacgtgcaggacacatggtgagggcagacacagactactggctacaccctcagctgcgaccctggtggcttggacaggggcccagttctcaccgaaatcgagactctcttctctccataaactgattccccagggaccaggttcttggtgaccagtgcatcttcctttcctcgacaaatgaagacacctgggtgaggggatcagagcaggggtgaggacccccagcctctccctgccccgaagctcagccggctccctgccttcctcactcaccctcatgccgatgcggctccaccatcacattcttccccgactggtttcctctttttcctccccgaccacgaccccggttgccaccagaatggaagcctccacctataaaggagaggtacaacaggagagaaagatcctgaatctccgccctccccactccccacctcaggaaggcctcctctgtaacccctagccaatcttaccacctcttcctcctcctccaccgccgccgccgcctccacctcctcctcgtccacgacctctaaagcctccgcctcgacctcggcccccgccaaagccccctcggcctccacgaccaccacggtcaccaaagccccctcggccgccaaagccacccccacggggactgaatcctgtgggggaaacaaaacaggagtcagggcaatgaagcttaaaaggttaaaccaccttgtacccagcaatacctctcaggtgagaaacctgaaatacatgtgcccgtgtacagcaggacacatttccaagaatgtccacagcaaaagaaaagtgaagactaacccaaatgtccatcaatagaatgggcaaataaaatagaagacattcacaatcaagatcatgaaaatgaccttcagttatacacaacagactaataaatgttaaaatcataataattttttttgcttagtgctttttttttgagacagggtcttgctgtgccgcccaggttggagagcaatggcacaatcacagctcaccgcagcctcgaactcctgggctcaagcaattctcctgcctcggtctctgaagtagctagattacaggtgtgtgccactactcccatagtgtagagatgggggtctcactatgttgcccaggctagtctccagctcctggctcaagtgatcctcctgccttggcctcctgaagtgctgggattacaggtgtcaggcaccacacccagccacaatcatactgcccaagaaaaggagcaagggaatgagaaatgtaaaactcatgatattggtgaatgggaaggagatattaatatggggttgggataggggaggagtacatgaatagatgtaggttactgttaatatcctggtttccttggttgcatagcagattcacagaattcattccatgtcaatattaattactgtgaagagtgagccctgcatacgagcacatgctgtgacaacagggccccctagactctgcaaacgtcttcatactctcccactcctgaccttggagctggaagaaaagtgtcaaccccagccccaaaacagaggggaatacaggatgatgtcagccctaactcatctccctgcttccaagcttaaagaagtccctctcagctcaggggaaaaacaagaaaaagcagaacaaactgtcatttaaggataggctgcactttacaagtagtttgcgacttgtcagtaagatcgaaatgtttaagaaataacagactcagacaggctttattcttaccagttcaggacaacaaacaccattagcacaaaacaacgtttaaaacagaactctggtgctaacagattcaatattttctctgatttggtttcaaaaactcagaagtactaaatcacacaagttaaaaaaaatagttggaaaactagtggtttaaaattatctcacattctcacatgatgtaatctattcaatcataagcttgcttttttttttttttgagacggagtctcactctgtcacccaggctggagtgcagtgacacgatctcggctcactgcaagctccacctcccaggttcacgcctttctcctgcctcagcctccccagtagctgggactacaggcgcccaccaccatgcccggctaatttttttgtatttttagtagagaaggggtttcaccgtgttagccaggatggtctcaatctcctgacctcttgatccgcccgcctcagcctcccaaagtgctgggattacaggcgtgagccagcgcgcccagccttgctcatgttttttgtaaagatacattatgatcttgtcctacgaacccttcatgcaccttaatggtattaaagataaaaaatgtgtcttttaacagccattcctaatttaatctttaaaaatgaacggtttcattttcaaaactcccaaacaaccaaaagttgtttacttttaatcttctactccctctacagtccacttttcacacagcagctaatacatgctatttttaaaacagcaagtaagatctcatcatgcccttgcccaaatccctccaatggttttccaccacatccaaaatgaaataaaaagtcctttccctggcttacaaagcctgaaatcaaagcctaaaatctttaggctttaaattctgatttcattgttctgggcgcaaggtcttcccctaaagctctccaggtgactccaaggtgcagcccacattgagtatcatcatcctaaggatctggcctgtgctgacttccctgacttcattctctttatgctgggccccatgctcttccccaccaagcatacacagtccagcttctaaatctttaccacgtgctgttcccactgcctggctcctgcagacatgtgcatggctcactcgctccttcactgcattctggtctctgataaaatgttagttccccagaagggcctactttggccacagtacccttaccctgctttatttcccttcaaatcaattatcacacatggcatttttaatattattaccacctgcctcccccactaagatcaagctccaaatgggcagggatttttaactgttttggtcaccaccgcatccccaaaaccctgcacaacatctggcacaaagtatgggctcaataaatgttaaatgagcactgagctgatgactcttaaaccctgggccctgcctcaaggagaaagcaccctctatttgttcagaaagcacacaatccatcagatggtgaccagggaagtgccggtcactcccctcaagtatcgcatatggagagataggcaatgttgctgccactctcgaccctagtaaggaaggttcataggggtcttgaaaacttcatctgtaagacatggagacaatacagtgccaggccacgcgccatagctcatgcctgtaatcccagcactttgggagacccaggcaggcggacagtttgaggccaggagttcaagaccagcctggccaacatagtgaaaccctgtctctactaaaaatacaaaaaattagctgggcgtggtggcgcatgcctgtaatcccagctactcaaaaggctgaggcacaagcatcaattgaacacaggcggaggttgcagtgagctgagatggtgccactgcactccagcctgggtgacagagagagattctgtatcaaaaaaataaaaataaaaaaaatgcagtgctcatcctatagggttgtaaagattaaatgacttgtacccacagagcacatcacatatatactatctggcacctactttgaacatcatcattcaaactcaggggtacgcgtctcctcttccctcctcatgtaccaaaagtacccattcctcagaaaaaacacatgttcacacaaacttttccagttagttcttttttcatctttctattaaagatgaaaatgtaacttttaatagctactcctaatttgatcttttaaaatgaagtttccttttcaaaactctagaacataactaagagttgttcactttttaatgttctactccccctacagtccactttccacacagcaactaataagtgctgtttttgaaacagcaactcagatctcaattttcttgcccaagccctccaacagttttccaaagccaagaccttcatttaggggagatgccacagctaggcttatgaaagtctcaacccaggcctaacagaaaggaagtactggcatgtgcttggggcggagtgggcatgagtgtaaactttcaatcccagatactcaaaacatctcaatccgtttcaggtcctggagcttttgggggaaaatgtaccaaaagtacccagtcctcagaaaaaacacatgttcacacaaacttttccagtaagttctttttttggggggaggggggtccataaaccccctgatttaaaatctgctctccttccacagccttctccatctcaaaaatggcaattccatccttccagttacacacccccaaacccttggttatccttgactccgatcacacacccacatacaatctgttggttctgtcttcaaaagcatgtaaaactgtcagcatgtccactgctcccatcctggtccaccacaccatctcctagattacagcaacaagcttcccaccaatgtgcctgcttccacttttgccaccctgaggtctttcacacatcgaagcaaaaagaatcccttttaaaaatgtcagactgcaccacgcccctgctcaaaaatctcccaaagggttcttttctcactcaggctaaaatccttactaaagagctaacacctgacaacttttacaacttcacattctaccacacatggaggaaggttggaagaacgggtatcctccatttatgagggaatcacagaccagaatgcctgcaggcaagccaggatctcagcatacctggcctacaatcccccaccccacttcatcaagagatccccaaacacggaagagaaagggaacttgggagaagggcacagatccacaaatctcctgccaggtgacccccatctctccacacaaacacacacacaaaagaaaaagaaagcctgtactaggaaaacagaccctttgggccatggtggaaattctccaaactcaatgaagcaagttctcacacagatgagtgcgggttgggcaggccagatggaggaagtgctcaggcaccaccgagaaggattctaatgttgttctctttgagaaagataaaggtaacaattagagctaatactattatatgtcaagcactgtgctattttttttaacgtcgcttaatcctaactggcgccattttattgatgagaaaacagaggctcagagaggtaaagccacttgcccaagttcacacagcaggctaagaagctgagcaagagctgacacactgaactgaggcccttctgctgtcaaagccaggaccccctcatcattccaccatgaagggagtggtttcagcagaatctagtggaaaatcttaagaataaaactacttacctcctgtgacaaccacccgccccaccaccccagactaatgccgagcttgttaagtctcgtcccggaggtggaaatcttaatccccaaatctccactccatccccggggatccgccccactgtaagtgcagaaggcgggaaagtgagccgaagagcgccgcacacggccaaccggggagtcctcatccactccggcccactcggaaaagctgggatgcgggataaggggatggtggtggtggcagcgacagggaaggcaaatgggggcttcccacacacagctccaggacccaaggtcaggaactctccatctccgacccaagcctgattcccaaaacacgcccagcgatccaagactccagatgcctgaatccaaactctagcccaagacccttgagtgccgcctcctgcccaatatccaaaatccctattagacggcctcaatgagacgaaccccacgtcaacacccccaatgccaggcccacggccttcttcgactcacgaccgtgacctctgaagccagtcacaaacccctagacctgctggaatcagaatcccccttcccacaggagactggaacccgtgctcagaacccctgcccccaggccaaggccccacccctccgattctggcctggcacccggattcccgcccggcctccgtccctgaccccggaccctcaccccagcctgacctggcttcatggcgagccctggtttgtgcggctccggagtccgcggcgttcacaactccacgagtccggggctttcgcacgtggaaaagagcgcaggcgcgcggcgacgtgcgctgcgtgacgccaccccgtagtcccgcccccgggccccttccccgcccggagctcggcgcacgcgcagtgagcctggattctcgagcctgtcgacacgcaacccgctgccctcgctctctgccttcccagcctttgcctgtgcagcggtcgccctaaactcgcttccggtttcctcttccccaatgcgagcaccccaataatcagggctcatagccttcgcacgggctgtgccctcttttgtattcctagctaaatccctctggcccctgtacacccaaaaaggcttccccaatacatttccagccccaagaacagtgaccgactctgggcttccattcaaacatccgaaaaacatttacagtgcacctcgtgtgtaccaggtgctgttctaggagctgggaatacagcggtgtacgagacataaaaatctccactctcctggagttcatctttttaatggaggaaatagacaccaaacatgttgaatgtttgaaagcgataagtgctttggagaaaataacagcagggaaaggggatagagattttggagggcaaatgatttttgtttttttggcacggtggtcaaggaatgcatcaggagacttttgagctaaagggctgaaggaagtgaggagtgaggcatgcacctatctaggggaagagagttccaggcagggaaaagatctgcagatgcagaggccctgaggaaggaaagatatgggaagttggagagacaatgaggagggtgggtggggcaaagtgagcaaggtggagagtaagaggagataagggcgggtagctaacaagggcagattgtgcggagctttgtgggacatagtgaggacttaggcagtaagatggaaccatggaagggttccaagcagagaaggaatgtgatctgacacaggtccctctggctgcatgtgggaagcagactgcaggagtgagggtgaaagcaggaaaaccaaggactggctgctgccgtgaatcagaagaaaaggatggacagatcagagtgggggcagagagcggcgtcaggggtcaacagattctgcttaagtattaagaattttgggctttgtaattgtgtaatatcagtatccatccctatattcattctgcaaagcaagacaactgctgttatgagaagttaccgaaaaactccagaagaacctaccagtccagagcctagatgttgactctgttccattcactgctctatcactctaggcctaggacagccctctgggtgcccagtaaatgtttgttgaatgaatggatggcctcataccgttgtgagttctctgtgtacagtgttccagctgtggaatgccaccaatttgcacagaaacattcctgaaagattgtttagatattatgatggaaaatctgcttaaacttttcagaaccggtcggggcagtggctcacacctgtaatccaggcactttgggaggccgaggcaggaggatcgcttgagcccaggagcttaaggccagcctgggctacagagtgagaccttatctttacaaaaaataaaaaattagctgggtatggttgcttgcacctgtagtcccagctactcaagaggctgaggcaggaggatcctttgagcccagtaggtctaggctgaaatgagccatgactgcaccactacactccagcctgggtcacagagcgacacccctgtcccaaaacaaaaacaaaaaccaaacaaaaaaaactttttaaaaactatgagatgaaatagttgagtctattctggatttctagatgtgcaatgattccagtgggtccaattccggataatgttacctatttcacatggattttactatttgccttctaattaatatttttcttctaaaggacaaaagtactcagagtgcagtgcagatttaggggattccagccctatttcttggaatcctggcaccatctcctgcttctgagatactttgcctgctagcttgctctgaagacctgaaattggctctatcggtaagtaattagtggtggaggtgcctgttggtcttgtgctggggacacaatggtggctaaaacagccccgggtcctgtcctcctggagctgccagtccaataggagagacagacaggttcccaaacagtgttggcccagaggggtcagggctgggacaggcagaggggtaggagggcaatgggggaagcaccggcagaaatgggactggggagccccaggcagggggctcagggccaggataggggaggcccaggcagagaggtgggagggggatggaggagacactggcaggcagggcagggcagggatagcgaagcccttgaggacttttcccaatattccccatttcctcaactccctctgaaccttcctgtgaccttcttgctctaaggaggactctgccctgaagacctccctttccaagcggggctgttttctccttctcggccttcatgtccactggatctgtagatgggagaagagcgtccttgctcctcactggcacttctaaaccattgtctctgcctcctccctgaaccctaggtctgaagcttacacagtcacactgtagcacctgctcccctttgtgctgctagacccattgactcccaagtcacctctgctcacctcgtcatttagcttcaggctcactgtcacccacaccactcctgtcattattcttggtgattttcaaattcaggtaaatgatccttttaccactctggcctcttggtgccttgacctcctctcccccactgcacttgtcctccacccaacccttctttcccatgatcacacctagaccttgtgctgggaacacacaacaacacataactgtgacagccccagaggtcccagcctggtgggggagaaggacccattctagatggcaacagccgcataaccacagcccctacagaatctcagctccatgcatctcacgctctgcccgtcacctcctgtctctccagctcactccttctaaagattgcaccagtgagccttcagccctaaccatccattaagctgtctgacttgttgctatccctcccccaatcatggccacaccactctcaactacctagccagattccccaccatcattattaccacacctttgcatacctccaaactatgaactgaattcaaccctccatttattctgcacctgcacccctggcagctgaatgtggatggagaaaaatacagaatcaccctggctggtctcggttttgattcatgactacaaacccaaatgcttaatgctgaccagcaatcctatcacttgcccccagtctattcattctccattttttcccaccctgttgatggtatagataacacatggccatgggctgaattgtctccccacacattcacttgttgaagttctcacccccattgttatggtatttggaagtgacagcattgggagggattagggttggaggaggtcatgagtgtaaaccctcattatgggattagtgactttattattattattattatttttgagacagagttttgctcttattgcccaggctggagtgcaatgacatgatctcgtctcacggcaacctccacctcccaggttcaagcgattctcctgcctcagcctccagagtagctggcattacaggcatgagccaccacgcccggctaattttgtatttttagtagagacggggtttctccatgttggtcaggctggtctcgaactcctgacctcaggtgatccacccaccttggcctcccaaagtgctgggattacaggtgtgagccaccgtgcccggccaggattagtgactttttaagagggagagagggagagatgcaacccaggaagagggccctcacagagaatcacatcaatcagcaccttgatcttggactttccagcctccagagctgtaagaaataaatctctgttattggaaccattcagtctatggtattttaagacagcccacacaaacaaacacacatgtattaatttttaaaactttattaaggtataatttacataccataaaattcacccattttggcttggcgcggtggctcatgcctgtaatcccaacactttgggaggccaaagcaggcggatcacgaggtcagcagtttgagaccatcctggccaacatggtgaaaccccatctctactgaaaatacaaaaattatctgggtgtgatggtgcatgtctgtagtcccagctactcagaggctgaggcagaagactcgtttgaacccgggaggcagaggttgcagtgagccaagatcatgtcactgcactccagcctggcgacagagtgagactctgtctcaaaaaaaaaaaaaaattcacccattttaattctattgttcgtttaattctggtaaatttacagttgggcacccatcaccacaatccaatttcagaaaactgccaacaccccatttcatacaaatggaatcatacaatatgtagcctttttttttttttttgacttagcataatgttccacattgttgcaaatttcttttttatggctgagtatttcattctctggaatttcactggtctgttcacctgttgatgggcttttgagttgtttccagtttgggttattatgaataatgctgccatgaacattcatgtacaaatatttgtgcagatttactctaatttttcttgggacaagccctaggagtaaaatggctgagtcatatgctgagcatgtttaccttttgaagaaatgggaacacttttttccaaagtgattgggcctattttatttcttttagtttcttttttttatttttttgagacagagtcttgctctgtcacccaggctggagtgcagcggcgtgatcatagctcactgcagccttgatatccaaggctcaagcaatcctcctgcctcagcttcccgagtagctaggactataggtgcccgccaccaggcctggctaatttttgtgttctttctagagacaggtgtctcactatgttgtccagctggtctcaaacccctgagcttaagcaatctgtctgccttggcctcccaaagtgctggaattacagacgtgcaccactgcacccagcccagacccatttttttttaagaattattttacactttctcctctttcttcaaaccttaaaactttctcctcccttcttactctttgttgttcgtcttgcttccaaggagatagaagcaatgacaagagaaccccaacatccttctatcccaatacctatcagccgccccgcacctgttaccatgtatgctggcttcccatgtgtgactgtggatgactctctgttacccatcgcagtgcctagctgtgtgcaggtttgttatataggtaaatctgcacatgtaccccttatataggtaaattgtgtgtcacgggtttgatatacagactattttgtcacccaggcaataggcatagtacctgatagatcggttttcttttcttttcttttttctttttttgagacggagtcttactctgttgcccaggctggaatgcagcggcgtgatctcggctcactgcaacctctgcctcctgggttcaagtgattctcctacctcagcctcccgagtagctaggaccacaggcacatgccaccacgcctgcctaatttttaaaatttttttgtagcaatggagactcactatgttgcccaggctggtctctaactcctggcctcagcctcccaaagtgccacattataggcatgagccaccactcccagccataacgttctgtattttgacagaggtttgggttcatttcaaaacaacaaatttattctttagatgtgtacatttcactgtgtgtgaattttacccccaaaaaggaactgtacacaaacttgagctccagttaatgctacgtgtgctgaagtatttagaaggaagcataatgatgtctgcgacttattttgaagtgtgtgtgtgtatatatatatacaaatatatgaacacatatataaatatatatacatgtataaatatacatatacatatatatatattttttttttttttgagatgaagtttcgcttttgttgcccaggcaggagtgcaatgctgagatctcagctcactgcaacctctgcctcccaggttcaagcaatcctcctgcctcagcctcctgagtagctgggattacaggcgcccgccaccacacccagctaacgtttgtatttttagtagagatggtgtttcaccatgttggccaggctggtctcgaaaacctggcctcaggtgatccgcctgcctcggcctcccaacgtgctgtgattacaggcgtgagtcaccacacctggcctgaaaagtgtattttaaaagagggatcaaaggctgcatgaagggatggatcaacggatggatacataataaaaccagtatagcaaaatgttaattacagactctacatggtgggtagatgggttgtctccatttgttttgtgctgccataatagaattcctgagaccgggtgatttataaggaagagaaatttatttctcacagttctggagacggggaagcctaagacgaaggcaccagcatctggtgttgggtgaggcccttcttgctgtgtccttacatggcggcaggcagaagggcaagcagggacgaacactgtgtcacctcatggcagaagatcagaagagagcaaatccaatcccaaggattacagcagtgttaatccactcataaggatgcggcctgagccctcaggacttaaacacctcctgttaggccccacctcccaagacggttgcactgggggttaagtttccaacacatgaattttgagggacactttcagaccataccaggagtgctgactgtatatttcttcaaactttctgcatgtttgaaaagggaggagagggccgggcatggtggctcacacctgtaatcccagccctttgggagtctgaggcgggcggatcacgaggtcaggagattgagaccatcctggctaacacggtgaaaccctgtctctactaaaaatgcagaaaattagccgggcgtggtggcatgtgcctgtagtcccagctactcaggaggctgaggcaagagaatcacttgaacccgggaggcggaggttgcagtgagcagagatcatgcctataatcccagttactcaggaggctgaggcagaagaatcgcttgaacccgggagacggaggttgcagtgagccaacattgcgccactacactccagcctgggcaacagagcgagactccatctcaaaaaaaaaaaaaaaagaaagaaaagaaaagaaaagggaagagagggatttaaatagatgcaacacagagaacttttagggcattgaagccattctggatgtcactctaataaagcatgcatatcatgacacagaacatgcaccaccaagagtgaaccctaatgtaagctatggactttgggtgatgaagactgtcaatgtgggttcattgatgataacaaaggtgacactctggtgcttgatattgatagcaggggaggctgtacatgggtgtatagtatggggcaggagatctaggggaactctccatatgttccactcactattgttgtgaacacaaaattgctctttaaaaaagtctattttaaaaattggccaggtgtgacagctcatgcctgtaatcccagcactttgggaggccaggagaggaggattgcttaagcccaggagtccaagaccagcctgggcaacatagcaagacaggaataatctccctgtctctacaaaaatacaaaaattagctggcattgtagcacacacctgtagtcccagcaactcgggaggctgaggtgggaggattgattgagcctaggaagttgaggctgcagtgagccgagatggcaccacagcactccagactgggcaacagagtgagatcatgtctcaaaaatataaataaataaaaatttttaaaataaaaatttaccttcaaggccagggatggtgactcctacctgtaatcccagcactttggatgaccaatgaccaaggcgggaggattgcttgagctcaggagtttgaggctgcagtgacctgtgatagcaccactgcactccagcctggacaacagaatgagaccttgtcttaggaaaaaaacaatacattaaaatccactggaaaacaacatgaacaacttctcttggcttcacattctcctctagccatcacctccatctctctgggttctttttttttttttttttttttgagacagagtctcactctgttgcccaggctggagtgcagtagcacgatcttggctcactgcaacctccacctcccggattcaagcaattctcctgcctcagcctcctgagtagctaggattacaggcgcccgccaccacacaccacacccgactaatttttgtatttttagttgagatggggtttcaccatgttggccaggctggtctcgaagtcctggccttaggcgatccacccgccttggcctcccaaagtgctgggattacaggcatgagccccccgacctggcctctctgggttctctataactaaactccttgaaagaattttctgtacttactgtcctcacttctcctcatcttttctcttggacccattccagtcaggctttcctctccatcactccaccaaaatagcttttctcaaggtcaccaaggtcctccatattgctaaagctggtgatcaatttcctatcctcatcttctttgaccatcagtggcatttgacactgcctcctgcttaatatgctttttccacttagctttcaggactgccaccttttcctagagccctcccacctcactagccaccctctctatttcttcactagctcccctcatcttcccggtcttgtttccttagggtgccccagggctcatgcttcagcctccttctcttttctatccatgctgctcctctgatgatccaaccattcttttcattgtattaaaaactggcaactcccacatttatctctcaagcctaaacttcttccttgaactccagactcacatgtccaactgcctaattgacatttctactctgatgtagacatgcattaacaaatgcatgtaggccgggtgcggtggctcatgcctgtaatcccagcactttgggaggccgaggcgggtggatcccctgagatcaggagttcgagaccaggctgaccagcatggtgaaaacccatctctacaaaaatacaaaaattagccagacacgatggcgggtgcctgtaatcccagctactcagaaggctgaggcgggagaatcacttgaacctgggaggcaaaggttgcagtgagccaagatcacgccattgcactccagcctaggcgacagagcaagactccatctcaaaaaaacaaaacaaaacaaaaaacaaatgcatgtaatttgcatgcacttggtggtttaaaccacaaatttgctgtcttaaaccaacagaaatttattctctcaaagttgtggaagcaagaagtccaaagtcaaggtcaaggcagcgaggccctgcctcactgccttcaaaagctcgatgggaaaatccatttctttccttttccacctcttagggactgctgacattccttggtttgtggcggcatcactgcaatctctgtctccatcttcactttgccttctctgtgcttgcttccctcttacaaggatacgcgaaattggccaggcacgtggctcacgcctgtaatcccagcattttgggaggccaaggcgggtggatcacctaaagtgatcccagctactcggaaggctgaggcaggagaattgcttgaacctgggaggtggaggttgcagtgagccgagatcgcaccattgcactccagcctgggtgacaagagctaaactccatctccaaaaaaaaaaaaaaagaaaaaagaaaaaggatacaagtaattacatttagggctcacccagataatccaatccaggataatctccctgtctcaagagccttagcttaatcacacctgcaaagaccacctacccacataaggcaatatttgcaggttcaagagattaggatctgatatctttgcgggggtgggggcatttttcaacctaccacaaaacatctcaaacttaatagtaggtgctcaaacacatttatttattcattgatttattttattttttattttgtagagatgttttccgggctggtctcaaactcccggactcaagggatcctcccacctcatcctcccaaagtgctgggattatggtgtgggccatcgtgcctggcaaaaacacatgtattgaatgaatgaaggaatgtccacagcagggtcataagagctagcattgagtacacctgtcagcgaaaactcaaattagaaccaagtgtgcaaaactttgcggaggctgttatgactaggaccttgatgacttgatgaattttctttttaacttatgtaacaaaattttaaacttttcacaaaaagtagagaatatgagaagtccccatttattcgccacctggcctcaacaactattaacatgtaaaacagccttgttttatctattgcccctccatctttttatttttttctggagtattttagagcaaacctcgataatatgccatttcacttccaggtacttaagtatgcatctcttaagaaaaagaagagaacattttcttccattatcacacctaacaaaattaacaagaagtcctttttataatctagtagccagtctatatccatattccctcaatggtttaaagtatgtgatttaggctgggcacggtggcttacacctgtaatcccagtactttgggaggctgaggggggaatggatcacctgaggtcaggagttcgagaccagccgggctaacgtggttaaatcccatctctactaaaaatacaaaaataagctgggcatggtggtgggcatctgtaatcccagctactcgggaggctgaggcagcagaatcacttgaacctgggaggcagaggttgcagtgagccaagatcgcactattgcactccagcctgtgcgaaaagagcaaacttccatctcaaaaaaaaaaaaaaagaaaaaatgatttaaacagtactgctggctaggcatggtggctctcatgcctataatcccagcactttgggaggccaaggcagatagatcacttgagatcaggagttcgagaccaggctggccaacatggtgaaaccccatctctactaaaaatacaaaaattagccaggtgtggtggcgcacacctatagtccctgctactctggaggttggcgcatgagaatcactttaacccgggaggcagaggttgcagtgagccgagatcacaccattgcactctagcctgggcgacagagtgagactccatctcaaaaattaaaaaataaataaaaaattactgcttgtttaaatcaggatcaaaacaaagtcccttcatttggtgtgtgttctctctcttgcacgcacacatacatataagctttttagccaagagtcttcagagattataatttatttatttgttacatagagacagggtctcactatgttgcctaggctggtcttgaactcctggcctcaagcaatgcaacctggcttcccaaagcactgggaatacagacaggcatgagaaatgccaggctataatttatttactttagatcttatttggggggagtacaacatgctaagagaaaagtacatgtaactatggttttatgaagtatcacaaagggaagaaaccacataaccgccactcaggtcaataaagagaacatgaccagtacccccaaattccccttttggctctactcttaggggtcttttcatgtgtacactgttctaaccttgcttccttcactccataatatattatgaagatcacccccagaacagcttatagagatctttcttatatttcatttatctggatagtagtctggtgtgtagatgaaacgtcgtttagtcaaccagtctaccaatagaaaattgacttagttgtttccagtcttttttccttacaaagagtgttgcagtgagcaacctgggctcgttgccggtggaaggtgtccaggttctgggcgttttgaacaaagaactggacaaaacgcaccaacgaaacaaccaacaaaagaatgaagcaaagaaagcatacatttattgaaatgaaaagtacactccacagggtgggagcaggctgaacagacacactccacagaccaggaagcaaccaatcagaggctgaagtgaaggtacaaagttacaccctatgcaaacgtctgatgggtcgcgggaggggaccaatcagaggctgaagtgaagttacagagttacacccctatgcaaatgaagactaggcccatgaccagtctgattggttgtgggagactaccaatcagaggcactttccatctttcatcggccacgcggggaggggaggggaggggaagcccgccggggtcgggggttgcgaagggagtagcctctgatccttttgttacttgggtgtggaaagttgggattttccttttgattccgttctaggaagtcagtgcaaatcagccttaggtttcctgcctctagactattctcctgcctcagcttacatccttttattgccaatgtatctttaagttggattcctagcagtgagatcagatcaaaagataaatgcagccgagcgggggggactgctcacgcctgtaatcccggcactttgggaggctgaggcgggtggatcacttgaggtcagaagttcaagaccagcctggccaacatggtgaaaccccgtctctactaaaaatacaaaattagctgggcatggtggcgcatgtctgtaatcccaggtacttgggaggctgaggcaggagaatcgcttgaacccgggaggtggaggttgcagtgagtcgagatcccgctaccacactccagcctggctaacaaaatggactccatctcaaaaaaaaaaaaatttttttttaaatgcacctgcaatcttgttagacactgccaaatgtcccttacaccttggacttacacgttgtgcattcccactggtaacacagaagagtgttctttttctcatagtcttgtcaataaattatattgtctaatttttgtgactttgctaatgggtgagaagtagtatcgcagggtagtttaatttgcatttctctttatatgagcagaattggacatttcttaggttttgtttgtttgttttttgttgttgagacagagtcttgctctgttgcccaggctggaatgcagtggcacgatcttggctcactgcaacctctgtctccccgactcaagcaattctcctgcctcagcctcccgagtagctgagattacaggcgtgtgccagcaagcttggctaatttttgtattttcaccatgttgggcaggctggtctcgaactcgtgacctcaggtaatccgcccacctcagccttccaaagcgctgggattacaggcatgagtcacagtgcccagccacctccttaggttttaaggcaatttgtatttccttttctatgaactattccaatcgtttgcatatttttctactgaaatgttgctttttattctttatttttaggacctcttaattctttctctcgaagggaaattgatccccagcaatggttgacagcaaaattaaatagaaagcactggctatggtagaggacacatctggattcaaatctggcctccattatttacaaaccgtttgcccttgggcaagttatttaacttcactgagcctatttctttgtctattcccgtttcacagagtaattatgaagttcagaaatactgtacacaaagaacatgacacattgtatgcattcaacatgtttagattcctcccaattgcctgtttatatcctcaacccatgtttttcttttcttttttcttttttttttttttttttgagacagagtcttgctctgctgcccaggctggagtgcagtggtgtgatcttggctcactgcaacctctgcctcccgaagttcaagggattctcctgcctcagcctccagagtagctggaattacaggcacataccaccacgcccagctaatttttgtattttttagtagaaatgggggtgtcaccatgctggcaaggctggtctcgaactcctgacctcaggtaatctgcctgcctcggccacccaaagtgctgggattacaggtgtgagccaccgcacctggccaacccagttttttctaactgggttcttgtctttcttattgaaggatctctttgcatattgtggatattaatcctttgttaggtttgttgcaaagctttcctgcaagtttgtttttacttatttattcattcatcagtaggtgtactgagcacctactatgtgacagagactgtgctaggagctgcaaataaagtagtgaaagaagcagatactgtctctgcccttaagttatttctaattggagagaaaatcaaacaaaattaattataaagtgtgacaaaggctaagaaggaatttagcaaaagggtgggacagaaggggatccacttttggtggggtggtcatgaaaggcctaagttattaacattgaagatgacattgaaggatgagaaaaagccagtcatgtcatgaatggagggacaagcatattataaaggactgaagtggcaaaatgtggcacattcaataaattgaaagatcacattcccaaatcataattggcagggagaatagtgataggagatgagtcaagaggttggcaggggcctcacaggacaaggtgaagaaatttgactttattataaatgtatataattattatatatattatataatatatatatttatgtatataattattatatattatataatatatatttatgtatataattattatatattatataatatatatttatgtatataattattatatattatataatatatatttatgtatataatcattattattatttttttaaaggacaggatcttgctctgtcacccaagctggaatgcatggcacaatcatagctcactgtaacctcaaactcctgggcttaagcaatcctcccacctcagcctcctcagtagctgggactacaggcctgcaccaccacgcttggctaatttttaaattttttgtagagacaaggtcttgttatgttgcccggctggtcttgaactcctggccccaagtgacctgtttctattttaaggaagattctcatggcagctgtgacaatggattacagaagagaaagagcggacagtaggctaccatgttgttgacagaagttaggataatggcttgtaccagatggtgacagtgggcataataagaaaggtagatttcaggtatgttttttgttttttttgtcgagatagaatcttgctctgttgcccaggctggagtgcagtggcacaatcttggctcactgcaacctccgcctcccaggctcaagcaattctcctgcctcggcctcctaactgtgattacaggcacccgtcaccatgcccggctaatttttgtatttttagtagagacagggtttcaccatgttggccaggctggtctcgaactcctgacctcatgatctgaccacctgagcttcccaaaatgctgggattacaggcgtgagccaccatggggccttgggtatgttttgaaacagttcaacatgatttgttaaggaactgagtggaggacaaaggagaggaagaaataaaaaataattcccctggccgggcacggtgcctcacgcctgtaatcccagcactttgggaggccgaggcgggtggatcacaaggtcaagagatcaagaccatcctggccaacatggtgaaaccccgtctctattaaaagtacaaaaattagctgggcgtagtggcgcacgcctgtaatcccagctacttgggaggctgaggcaggagaatcgcttgaacccgggaggcagaggttgcagtgagccaggattgtgctgctgcactccagcctggtgacagagcgagactccatctcaaaaataataacaataataataataataataataattcccctattttcttgctgctgaacttactgggtggtaattgtgctatttaaggaggtagggaagaccctcatgggaaggggacagatttgaaaggaaacaaagacttcagtgttttacttgttggttgcattaacacattaaatcttcactccagctctataagtactatcattaactctactttaaagatgagaaaactaatccagagagaaattaagtaacttgctagggttataaatgataaagccagaatctattgatctttctccattttccactccttccctccatccaatcatttatcttctctttttattgagacagggtctcactctgttgaccaggctgaagtgcagtggaatgatcatggctcactgcagcctcgacctctcaggctccagtcatcctcccaccttagcctcccaagtagctgggaatacaggcaagtgccaccacgcccagctaatttttatattttttgtagtgatggggtctcactatgttgcccaggctgatctcaaacccctaggctcaagcaatcctcttgccccagcctcccaaagtgctgggattacaagcgtgagccaccgtgcctggccatttatcttctcatccatccactcttctaatcacctattgcctcatcttcctagttccccacacaccattttctcaattcacccatccatctcttcatccatccatgcaatcatccatccatcctcccagcccccaataaatattcatcacgtgccagattccccaggcacctgatacctgctgtgcaggaggaaagtcagggatgagaaggcatgagacagacacaatgacatgcagcttagcttaagatatttattcaatgctctcacatttggcctctgtgacccagaaaagcggtagagcagggtaggagcacatgatgcatccttcagccactgcaacctccagagggaccaggtcttcttcaggaaatcttcgttcctggtggatgactgatcagccataactgcaagacacagacatttagcacctccgcttgcagactaaacacccaccctgactgccctcatcccatgaggatccaggtgcctttgccccaagaagcctggtttccatactacatccctcaccatggggagaagtcctgcgctctccatttctccatcgctggcttctcctgggagtcatgccaatcattggtctggtccccgtcaaagtttccacaggccccacacagtttcccagcatggtcattgctgacaatcacagccaccttcccattggctccaagccacacctggacccctgccttctggcggactagcagggagccatcaggtgtacgactcacggacacagatgctaacttctcagctgggagatccactcggagaccattcacctggtgggggatgcccagcaaacacagaggtgaggccacagccccagaatagctgggtgttaccaggatggaggatggagaccccaaacaagataagttcatggagctaaatcaaagaggcaggtgctgaaagagatgaagacctggatgtttgcactatttggagcaatggatacatgagaagatagctagagatctggatagacggataaaaggatggagagtggagggatggagagacgtacccatggatctacacaacaccccaaagtcggtgggggaagcattttgtaccagacagataagcaaacagacagacaaacaatcaaaccccagggtcatccttatggttctagttttctttttcttttcttttttttttttttaagatagggttttgctttgtcatcccagctggagtgcagtggtgcaatcacagctcactgcagccctgacctcctagactcaatcaatcctcccacctcagccttctgagtagctgagactacaggactacagatgtgtgccaccacaccaggctaatttttgtatttttttctaaagatagggtctcactgtgttgtctaggctggtcttgaactcctggattcaggtgatctgcctccctcagcctggttctagtttgcaaaataaaacaaactttgagcacatcctgtaagttattggttccctaaccaaaacaacgttatcctttatttttgcaatgctgatgtctgaagataagtaatgactttagcaaatataataatcatgtgagaaaattactttttcttcatcataggctgcagatccagtaactttgtgagtttttcctttacataactgttgtctatgttagttggtgaattaacccttctaaagttagattccctagagaaacttccttaaaagacttgtcttttttttttttttttttgtaaatccttcttttgtttgtttgttttttgttgttgttgttgttgttttgttttttggttttggttttagttttttttttgagatagagtcttgctctgtcgcccaggctggagtgcaatagcgcgatctcagttcactgcaacctccgcctcccgggtccaagtgattctcctgccttagctgggactacaggcatgtgccaccatgctcggctaatttttgtatttttagtagtgacagggttttgccgtgttggccaggctggtctctaactcctgacttcaagtgatctgcccgcctcggcctcccaaagcgctgggattacaggcatgagccaccatgcccagccctctaaatgcttttgtatctgagttttcctctgccagatgattggagagataggtagatagatctgaaaagacagatgggtgggtgggtgggtgggtggatggatggagggatggatgggtggatgggtggattggtgggtggatggatggatggacagatgggtgggtggatggaagaaagaaggaagggaaaaagactagaaggaaggaaataggaaaaagagaagggggtagaatagatgctggaaggaaggaggggaaaagggaggatgggtgtagtgaaggacagatgaagactagtggatggaaagtctcagtagggtgcaagctttccaagtataacgactgagtccgagtcatctctgttacccagcacatggcctggcacaaaaggagcagggctgagtttattcacaaaaccagccttttactgagtaccctctaggtgccatgccctgatctgggtactgggaacaaactggtgaccaagatggacaggatccctgcctacctgcggcttatagtccagtgatgaacaaagatgctgagcatcttctgggagtttccttctaggagtctggaattttggtaggtggataccaaaaccccaggcactgagactctatgaatttccctggcagatgacatttcatgtttcatcacaactttgttgctggaggaattaagcacatcctgtgtgactctaccgagaaaggactctcggaagcttgcacatgatttcccctggactttgtgcgatgcaccttttccctgtgtcaatttcacttcgtatcttttccctatgatacatcttagccctaagtacaactatatgctgagtcctgtgagtcctagtgaatcactgaaccaggttatgggaaaccctgacacattatgtgaccccccacccccagccttgaccaatcacggaacttcctccctaaagtcacagtgattggctccaggggtgggcatgtgacccaaactggctcagtgagatataatcctgggtcttttattgaaccattttctgttaaggtagataagctggtggggtgtaggcctgggcagctgggcgggggtcgtctttacacctgtaagtggaaagcctgtttgagaacaaagctgatttggcaaatagcaagtctcaaagacggaagtacaaatttctgataatattgccagggcacctagatccagccattcctgaggctctatcctgggattttctagctacatggactaataaattcaattttgcttaaggcagtttgaatttggttttaagtcacttgcaacccatagagtctcgattcatactaatgtcaaaactattaagttgcttgagtatgtttttgctcctctagaactcagccagaacagagggaccaagtttgaaatattgagataaatacaaatccagagactaaaccgcagagacctggataaagaaaacagatcgcaagacagaaaggaagccaggaatgtggggacactgtaatcagaagagcaaaagcccagggagacattccctaccccctactcacaaacttacccacacacccttgtttggagtcaacgtcaccatcccatcctggaagaagatgtggacctggcccacagcctccgttttgccatggcagatctggacttcggcaactacacggtaccaggggatggtattctgtagtcctgggcagcgggaagagagctcatagacaccaggagaggtggtggcaccacgggccccatcaaaggtggtgaggttggcacccacagacaggacacagagaccacgggtggcccagcagttccgggcttcagccttgacctcacatacacggcctggtgggcagccagctgcctggcatgtcaggccagagcttgaggaacaggaacagcgctcgctgcagtctgaggtcagcagggaggagtttacctgtgcacagaaaggggccaggttatggtggtgggatggatcgcaaaaatggccacactgcttgaaccctctgtatccatgcagagtgactttacagactcccattaagaaatagagtttatttccccctccctatgaatctgggttggccgtaagactatatttaggtcaatgaaacacagaagaagcaatgttgtaacaggtttaagcctagacctcaagagacctcacagcttctctttccttctctctctctcacatacacagaatcctgcccagccaccatgagaacaagcctgggctagctccctagaagatgagtgaccccatggaacatagataactcttccagctcaggccaccctagaccaggcagccttcagctgacccaccagctgactacagatattatacatgagtaagcccagaggatagcagaagaaccacccagccaagtccagcctaaactgcagtcacaaaattgcaaactaaatgaataattgttttaagccacaacgttttggagtgatctgtaacccagcaaaagctaactgatacaggtaagaaatgaagaaatgtaattaacaaaataaatgccatctctacaatgatgatttccacatctctaggccagacctctcccatgaaggccagactcacaaatccaagacttcgggcataggcagaggggtcagggcagagatggggaagcatagggagctgaggggttcagaggaggcacctaacccagcctaggggatcaaggatggcttccagtaggcagtgagacctcaaggaaagagcaaaatttggctccatttgcaagcaatgcaagttagtgctgcatgttaatggctagcctcgggctgacttctctatgtcacaatttcttcatctgtaaaatggggaaaatagtcatagtatctattgcataggattgttgtgattattaaatgaattaacatccagaacatggccgggagaggtggctcatccctgtaatcccagcactttaggaggccaaggcaggaggattgcttgagcccaggagtttgagaccagcctggacaacatagcgagatcccatttctacataaaaattaaatagtcagccagggatggcagtgtgagcctgtggtcccagctactcaggaagctgagacagaaagatcgcttgagcccaggagtttgaggctgtagtaagccgtgatcatgccaccgcactcctgcctgaaagacagagtgcaatcctatctcaataaataaataaataaataataacacccataacaaacatggtgcatagtaagagctcaaaaaaattattaacaagaataaatcaattcttcaatttaattcatattattaaacaattattagctgggctacctatttgcactgttgtaaactgctatttctttttttttctttttgacatggagtctcggtctgttgctcatgctacagtgctgtggcacaatctcggctcgctgcaacttccacttcccgggttcacgggattctccttcctcagcctcccgagtagctaggactacaggtgtccaccaccacacccagctaatttttgtatttttagtagagacggggtttcaccatattggccaggctggtctcgaactcctgaccttttgatccgcccgccttggcctcctaaagtgctgggattacaggtgtgagccactgcgccccgctgtaaactgctctttctttttactgagtgtgatgaacatgcagggcaaggcccagtgctcagtgggtatctttcctgtataatcgggcctgatcctcagatacctatggtacaaagatggtgattagtcccattttacaggtgaagaaaatgcagttcaaggaggggccaaatgatgcccccgccccaagatatcaggtcctaatccctgtaatgagtaaatgtcaccttatatgggaaaagtgtgtttgcagatgtgattgaattaaggatctgaagatggaaaatttctcctggattatctgagtgagccttagatgcaatcacgtgtatccttataagagagaagcagagggaggtgttatgacacactcagaagaggaggcagaggttggtgtgatgtggccacaaccaaggaaaacctgcagcaaccagcaactggaagaggcaacaaacagattttcccctagatttcttttttcttttcttttcttttcttttttttttttttttgacatggagtctcggtctgtcacccaggctggagtgtagtggcgcaatctcggctcactgccacctccgcctcctgggttcaagtgattctcctgcctcagcctcctgagtagctgggattacatgcacgcaccaccatgcccggctaatttttgtatttttagtagagacagggtttcaccatgttggtcaggctggtcttgaacttctgacctcgtgatccgcccgcctcagtctcccaaagtgctgggattacaggtgtgagccaccgtgcctggctcttttccttttttctttagaggtaaggtcttgctctgtcacccaggctggagtgcggcagcgtgatcatagctcactgcagcctccaactcctggggtcacgccattgtcccacctcagcctcttgagtagctgggactataggtgtgcaccaccatgcccagctaattaaaaaaacaattgtatgttgcccaagctggttttgaattcctgggctcaagtgatcctcccgccttggcctcccaaagggctgggactgcaagtatgagccactgggcatggcctcccctagatttctctggagggagtgccaccttgccaacaccttgatgtcagcccagtattcctgatttctgacttttggccttcagaactgtgggagaatgaatttctcctgtttaagctaccatgtctgcggtaattggttacagaagctgcaggagactaatagggggaggttgcctgcatcaagtcacatagctgggatatggcggtacctcctctgtccccagccttgaagaggtcagcacagaatctctgggtctctctcaagctcttctaccctctctgcccaccccaagcccctactcaccggcaagtatcggccattatgggtgcagccacaatcttggacagggatgcagacaccctgggaaagcaggaagcggtcgtcgcactcacagccctcaaaacagcgggtggtgcagcccgtgaggccggagagagccgcacaggatccctggcaggtgcgagtgcagatggagtagtggctgtgggcggggcaatggagcgctgcagagagaggaggcagggctgagtcacacctccaaagggtcctggataaccaagggggcctactgcacacccagccctgttttaggcggtgctgaggacacaaatactgagaaaagtctcaaccccagtcctacagagctcacttccagtgggacagacaggaagagcccaaagtgaacatgctgcatcagggagtgtagacagagaggtcagggtcagggtggggaggcacaggcagaggggtcagggcaggcatgagggggcaaaggcagaggggtcagggccagggtagggggctacagacagaagggtcagggctgggatggggagggcacagacagagggttgagggccagggtagggggcacaggcagaggggtcaggaccagggtcgggggcacaggcaaagaggtcggggccagagtgggggcacacaggcagaggggtcagcgccaggatggggagggcacaaacagagggttgagggctggggttgggggcacaagcaaaggggtcagggctggggtgggggggcaaaggcagaggggtcagggccgggatggggagggtacacacagagggttgagggccggggtagggggcacaggcagaggggtcagggctgggtagggggcacaggcagaggggtcagggccagggtgtggggggcacaggcaaaggggtcagggctgggataggggggcacaggcagaggggtcagagttgggacaggggctatatggacccaagggaattatctgtggtaagtccctggtctctggctaagcaattggtggaggtgtggctgttctgcaatgcccaccaggtttggggaaggagcatcaggctgggggtgaaatgctgattttatttgggaacacagcaggtaagagggacggtaaggacacccaggggaaggtgtcttggacaccctaacaattaccacagactttgtagcttaaacaggggaaattcattctcccacagttctgaaggccagaagtcagaaatcaggatcactgggctgacagtcaggagagagttcagggcttgagacagacagaccaggtccatggtcaacaatgagaacaaatctaaggccgcgggtgtggatgaccgccctgggtataggtcctgcccaggggagacctggctctgacctggagccgaaggggccattgctttttcctgagagtctctggtgatgtccctcccatggggaattgaatgagaggtacagtcctagtttagcggggtgtttaatagcctgcagccttgtcttggggggatctgaggggatatggtcttgtcgggggtagaaggagggtctgtgtgagccacagatctcccaacccatccaactctccctttcaggtcactgcagaaagagtccagaatagaacactagggaagaagagaatttgaggtttgagcagagtgggcccagacaggaggctgagaaggaacagtcagagggatagcagggaagccagtggactatgccgtgggagaagaagttgtgtgggtgtggggtgggagggggtggggagggagcgcttttacagggagaaaccactccgacatgcaaatagaaggaatgggccaggaggggcccctacacctggtctagagtcctgcgagggacccacggacactcacggcagaagctgtctgtcctccagggcttcacggccacgccagctgcctgacaggccgccgtgtaggctgccaggctgcggcacaggaaggctttgtcacccttttgcgcgcacaggtcgtatacgcattggcggaagtactcagagggactcagcaccgcctggcaggtcgcgaaggggccctgggggttccggagctgcccgcaggcctcgttgctctcatagggtgcagtctcctctgccaagcacactgggcagccttggggcccgcagccctcgccacagcccttggaggagccgggcgcccgccatgcagccccgaaggtctccacactggacgctgctgagccattgggcaggacaaagtcgtcactccagttgccattgaagttcccacagaggccacagagccgtccacggaaggggctggggatggacatgaggaggtgggcatcgccatcaaagagaagccgcagccccttggtcgtctgcagaaccatgtttcggccctcggcggtcacccgcacgcggcccacagccacaggcagggccacagcctcgccgtccacggtgacctgggtggaagggtcgggtaggtcaggaactcacagaaccacaggcaaggctgtcctgtcccactcccaggccagagctgcatctccctcagtcccattaacgtcaggtcatgtttcccttaaacttcttgggccccaggcctggcgtggtgactcacacctataatcccagcactttgggaggcccagacaggtggatcacttgagcccaggagttcgagaccagcctggccgtgacagcaagacctcatctctaccaaaaataaaaaattagctaggcatggggggctgaggtgggaggattgcttgagcccagcaggttgagcctgcagtgagctgtgatcacgccaatatactccagcctgggtgacagaacaagaccctgtcacaaaacaacacaaaaatctcccacggtgggaccattcaccaaaccttccagggtaggtaccagagttcccatgttagaggaatgtccctctcatacctacagggtggggtcgtgtctccctcagaaccccctagatggggctgtgttgccttcagacccccagggcaggctcacatggactcacctgctgcccctgagctaggctcacaacctggccagccacagtaaccaggaggcgttggagatctccagctgcattcttctcaagcacgatggaaaagtcctcgtccccaggctttgggtggcagacttgggccaagacataggagcaggagccatgcaggtcgtagacacggccatcaagggtgatgtagtggatgcccccgttggccaggcagcggccacagcctgtggcatgacaggcctggacaccatcctctaaccggcactcctcatggggcccacaggctgcgccctcctggcaggtgacatggccacctggcccacactcacagcgccgctcacactcagggcccgggtagaagacctcgcccagtgggtagtagcggccatcatggaggcagccacactggcccacgggtacgcaggtgtcaccactgagtacgaagccagcatcgcagacacagccttcacggcaggccgactcacagccctcgggtgctgagaggctcgggcagctcacagggcaggagtcaccgcagagctcatagtggctgtgggcagggcactgcaaggctgtggggacaaggtgggcatgagccaggtaggtgttcgagtcggggtcttgggaggccctgagtgggaaaactgctcaggccaacttgagtgtctctgtgtatgcacatgtgatccaggacatctaactgggggactcagtgtgggacctggaatgggaggggacatgccctggtctctctgaccaggttatgtgttagcctgaccaaatatttctgaagatcaaatgactctgcttgcctgatttttatttatttatttatttatttattttttatttttttgagacagggtctcactctatctcacccaggctggagtgcagaggcgcgcttactgcagcctccacctcctgggctcaagcgatcatcctgcctcagccccccgagtatctgggactacaggtatgagccaccacatctggctaatttattagtagttttctgtagagatggggtctcactatgtaagccaggcttacctgggtgaaatggatcacttatatctattcggggtatgcaagatcagaactgactatgggtacctcagcgtgtgaatgtgactggggtgtggggccacatgtatctcagggtatggctctgcctgagggcacccagctgtgggtgtctgacatgcagcatctcccagagtccttctgacatggtctgcctaagggtgtgcctgggtgaagttggcaggatacctgtgaccaggagacctgcctgaagggaaccgcctaggactatctaaccatgcatctgtgtggatctgcccagggctatgtaagagtcctgattctatctgagtgtatctaaccagttagtctcagtacaaaatctgagcagataccactgaaggtatgtgacttattctatgtgactaggtgtatttcagtgtgtgcaacagaccaagggcctctgaccagctgtaactcactaggtcttcctaaccaggggtaccttgctgtgtgactgaggcagagtcagccatcccaatctacatgccttggatatctgagagcatggatcaccaatcctcaacagtgtcctggaccccaggtttctgactaggtgtttcttttctttctttctttttttttttttgagatggtgtctcactctgttgcccaggctggaatgcagtgtcacatcatggctcactgcaacctctgcctcctgggttcaagtgcctcagcctcctgattagctgggattacaggtgcccaccaccacgcccagataaatcttgtatttttagtagggacagggatttcaccatgttggccgggctagtctcaacttcctgacctcaggtgatccacctgcctcggcctcccaaagtgctgggattacaggcgtgagccaccacgcccacactctgactaggtgtttctaactctctctcactgcagtacctttcttggggcatttcagtgtgtgagtgccaaggtgtttggtgacaggagataccaagctcagaggaaggaaagtggcccctgagccccatggaggaggaaggggctgctgtcctacagtcctgggaagggcagggagagacccaaccatgtggaccatgcatggagcagtactcacgacagaagtccggccgcctccactcgccgagctgggccccagcggcctgacaggctgccacgtaggtagccactgcaggacagaggcctccaggatggccctgaacttggcaggcgtccagcaagcagccctggaagtactgcgcgggcggcacaaggccgtggcagggtgccagcgggccgtcggtggcggagatcacgccgcaggcgtccgggccgccgaaggactcctgctgctctggggtgcacggcgacgggcatggcttggacacacattccccgcagccctgggccccgcccacctgccatccagcgggcttcccgcccacagccttgaggtcgtctgcggggtcctggttgtagttcccgcataagccacagagagaggccgcgtacgccgccggcacgcgcaggcgcacgaagctgtccccatcgaaagccagcgagagccctgaggttgtggtcaccaccacgtcggcgccgctcaggtgtgcgtgcaggagcgagtccagctggaaaggcagagccacgaacacgccgtcgacctgcgggcgggggatggcggcggggggatggggcgcggtgagtggagagaacacgggtttgaatcctggccccaccacctactagctgtgggacccagagcatgtcacctcccctctgaaaataataatgagcatctataggccgggcctggtggcaaagcctgcaatcccagtactttggaaggacgagatgggaggatcacttgaggtcagaagttcagacccgcctgggcaacatagtgagacccccatctctacaaaaaaaatgaaaaattagccagcatggtggcctgcgcctttagtcccagccacttgggaggcggaggccaaggcgggaggatggattgagcccagcagttccaggctacagtgagccctaatcctgtcactgcactccagcctgggcaacagagtcaggctaagaaaagaaagaaagaaagaaaaacagaaaagaaaaaacaaagagcctctataggctcatgtcactgactcctcatccttctcaaaaacaggtactttcttagaccagtttacagaggaatacactaggctcagagaggaagaagccgctgtgccaagccaccaggctcctaggcgtacactctgacccttccatcatgccccagctaagctgtgaaaggggcccaggggaatggtgaagcccttaccatctcaggcaaccccagagctggcacttgctcctgtctggcccacagccctcctcacctgtagcttccggggccagcgggcactcagtgtcaggctgtggttgtagatttgcagggtgacactgcgggtgtagctgacagcctggctgccccggtgctcattggctacagtgacagtgaagttctcagcccccaagggtggtccgtggcagggtgcactcagcaggtactcgcaggtgccttggaaatcgaatcggtgcccatccagagtgacgtaatgggggtcaccccacgcctggcactcagctgtgctgacgggctggcagccgtgctggccggatggcaggaggccacacacttcacccagcccacagctggcaggtgtgcagaccagcgagccacccccaggcccgcagcgacaccactgggagcaggtgccatcagcccaaaactcactgcccgcctcgtggtaggtgccattggcccagcagccgcagccgttgttgaggggaacacagcggtcagcacttaacacgaaacccgcgtcgcactggcagccctccacacaggggccctcacatacggctggcgtcgtaaggggtgcaggggacggacagctggctgggcagggtgggccacagacctcatagtggctgttttctgggcaggtgatctctgtgggcagacgaaggagcaggaaggagagaaatagagagaagggtgtcaggggtggggtcccaggacagggtgggaggagacagagatactagggagcagacagaaaaagggagagacagaaaacaagacacagagaggacacagagaaagaaatgggagagggcgagacaccaggagacccaagcagaaactgagggagctagagaatgagaaacagacagatagacacaagcaaagcgaggcccagagatgagcaccaagagacagagagacaaacagagaaaaaagaaaacaaagagacccagaaggaccagagtgaaaccaaaccagccccgaagagacgggaccccgccccccgccccacctctgctcccccaacactcaccacagccaacctgtgcccgccagtcttcgatgacaaccccagcggcctggcaggcggccacgtaggaagccagagccttgcaaagaatgtcacggtccccaccacccatgcagacgtccagaacacagcccttgaagaagctctcaggtggcacatgagcatggcaggtggtgaaggggccccctgtgccagatgaaaggggtccgcagaagccagggccctcgtactgctccaaccggtcctcagggcacgttgggcaggacccccgacattcgtcccaacacagtgggtcccagcctggggctcgccagctgccgccccagatgggtatggagggagccagtgtgccattagggaagacctggtcattgttggggttgcggtccatgttaccgcagagcccgcacactgcgccatgatagctgctggggagcgtcacgtctacccgccagttccagtcatagctgacttgcagtccaaagtcagccaccagcagtgccttcgatgcaccctgggccactgaaatccgcccgtcggccacggagacaggcaaggctgtgagcacaccgttcacctgggggaaggagggaaggcaaacgggtcactggaggttttacggccccagctctggccctctgcctccctctctctcatcccaccgggggctgggagaggccagggccttcccccgagagttggattgtcatctgacacactgtggacagttgttctagcccaggtcttggggaacgaaacctcactttactttttctagatcttctcccttcatctctatctccctcttctgtctctctgtctctctgtctttctgtgtctctctccctctgtcttcacctaagtctatatcacttggtcttctctctctctctttctgtctctctgtctatctctccctcctcttcccttcctccctcctaccctcattctctgtgtgtctcttccactcactcaccatcatttatccagtgcctactctgttccatccctcattttctctctgtgagctaccattaagctctatctccatttccctgggcagaaaggatagcccatctgtctcctctgatctccctacatatctccctatatttctttctttctttctttttttttttttttttttttgagacagatcctcactctgtcacccaggctgcagtacagtgtcgaaatcttggctcttgtaacctccacctcccaggttcaagtgattctcctgcctcagtttccagagtagctgggattacagtagcaccaccacacccagctaatttttgtatttttagtagagatgggggtttcaccatatcggcgaggctggtctcgaactactaacctcaggtgatccacccgcctcggcctcccagagtgctgggattacaggcgtgagccaccgcacctagcccgatctccctgtatttctctctgtgtcctggtctctgggtctctcacttgttccctcacaaacactcaaacgactgttcacctggactagactctgagctcagcatgtgacatgcacggccttgctgtgggggaggccctgatacgatgcccacttcacagatgaggaaactgaggcctaccaagtgaactgcccagcatcacatagctcataaggaggagaggctggattgaaacccaggtctataaaaaaggcaaatgctgaggtcctatgttaaagccctttgccaggggctaggctcatttaattcccagtaacagggtgacatttttgctgcaattattctttttgttgacagtttgtttcaggcccaggtgaagacaaagagccttgagctgctaactgtggtcgtcaggatccctcctgccctcccggggacctcaggggaccatcctgccacacatacccggactttgccgatctcgtccttgtggatggagatgttggtgccgagggcagccacggtgacgactctcacgtaggacacagcagggttgccccggttctggttcttggtggtgacggtgaagggtgtcaggccctgggtgctgacccccgggcagccagttgttgccagcacatagttacaggtgccctggaagtcaaacttccggccatcgaaggagtggtagtgtgggtcgccccacagccagcacgtggcctcatagttgggcaggcacacgccctggccaccctgctccttgcatgtctcctgtggccggcatgtcacgccgtggcacgggtctggggacagaagagggaggaggaccttgaggggctgcccattgtaaagcatggccgctccctccatatctacccagtctgtgccagggatctgagggttactgcaggcaagaccacattccagagtcctcatgtctaggacccacttcctatagtttgcttttatattttcttttgttttgttgtttttttgagatggagtctttctctgtcacccaggctggagagcaatggtacaatctcggctcactgcaacctctgcctcctgggctccagtgattctcctgactcagcctcctgagtggctgggattataggtgcccaccagcatgcttggctgatttttgtatttttagtagagacagggtttcaccatgttggccaggctggtctcgggctcctgacatcaagtgatcagccaaccttggcctcccagagtgttgggattacaggcatgagccatcatgcccagcctgctattttcaagaccagcccctgggagtcgcacacagctgacactgaggccccatgggggactgtgtctaagtctcggctgtcaaaggtcccataccggagacctgggccccagaggtctgtacagccaagacccagtacctagagttcccctacctctgagactgaggccctgccatttgctgtgtgagactgagatcctggagtccacgcacctaagaccaaggcaaagaccaaggctctgggtctgtgtttaaggtgcactttccatggtgcccttgcttgagatttcaccctgttcttgtattttaagttttataggaacctcaccgtcttcacttacataggctacggctgctttcacaccacagtggcagagtgagtagttgtgatccagaaggtatagcctgcaagcttaaacacttaccatctagccctttagagaaaaggtgcacttgaccccagttgagatctgtgccccaggggtccttgtgtctgcgatgccagccctgagagcatccatgtctgagatcccagccccagggttctctgtgttcaagacctgggccccaggccaggtgtggtggctcaggcctgtaatcccagcactttaagaggctgaggtgggaggatagcttgagccctggagtttgagactagcctgggcaacatagtaagaccccatttctacagaaagattaataaattagccaggcgtggtggtgtgtgcctgtagtcccccactactcgggaggctgaggcgggaggattgtttgagcccaggaaatcgaggctgcagtaagctacactacactctagcctgggccacagagtgagaccttagctcaaaaaaaaaaaaaagatctaggtctcagggtcccccatgcctgagacctcagccccctggacatctccacatttgatagaaattggtctccaatttctctaggtcctggaggcctctatgcccaagactagggccctggggtgatcttctggcaagagcccagtgccagggtctcagcaggatttgaaatgtttgagaccctaactagctaagtctcatgggctgggctccctcagtgcaagactccatccctgagggttgctgtattcaagacagtagccttcatcgtgtctcactgctgaggccctgtcctggggggtttctgtgtccgagaccctgttcgtacagttactacatctgtgaccccagcttgcggaacccctgtgtgggagaggccagccttcaaacgtctccttcctcctgtgtccattatcaatgtaccgcctctcagcttcaaatacacccacggagttaagctttgtcaacagagggcgccggagagtcactgcaggagggagggtctccgggtctggcttctagccagtttggtcctttcagctctggccagggtgcggggccacattcagcgagtgccactggccgcagctggcttcccagtgaggggttcccttcttgccaagtccagcctgcagaaacctctgtgccacccagtgggctacagctgcagtgagactggactcagccttggggctgattctcccctccttgaagaggagggaccaatttctcccttccatgaggcttttaacttagccctagagtggcggctacttcctgtgtgtgctttggtggtattctttagtgctctctttaccgtttcttatttctgtttatttgtttgtttgtaaagagacaaggtcttgctgtcttgcccacgctagagagcagtggtgcaatcatatagctcactgcagcctcgaaatcctggggtcaactgatcctcctacctcagcatcctaaatagctgggaccacaggcacgcatcaccacacctggctaattttcaattttttgtggagacaggggtctcgctatgttgcccaggctggtctcgaactcctggcctcaagtgatcctcccaaagttctgggtgtgtgagccacggcaccagaccctctttacccttaatagttaatctcctattaataagtaagtgattctttaattaaactttcctcattcaaatggccatacgctttctgtctctcgactagatgctgagtgatataccccccattcctgggagtccccattatcctgctcatcagccctgagagtcttagcccccactccttggtgctggagctcccattctcttatccttagggggaggagagttctctgctcttcaccctaagaaatgagccctgggggtggctgtgtcccagatttagtctgggggattcccacatcagagactatacccctagaaatcctgatcttccagttaagaggggtccccatatccaatgtcctgccttggtgaggtctccgtgcgtgagactcagaactctgctctctgtccctgcccctgggatcccaatctctcccctgccctttggtgctagtgtctgaaccccaagcccgatcccacacatcagtgttccgctcatgatggaaccctaggctgctgctcttgtattctaaagtcttataggaacctgacctcttcacttacatagtctacggctgctttcatgccacagtggcagagtgagtagctggaacgagaacctacagcctgcgagcttaaacatttaccatgtagcacattagagcaaaggcgcgcctgtccctgccttataccgagggtctctgacatccaccctgagaaaactatctctgagggtccccacagcctggattttccctaagggtccctacctcccaaagtaggtggccctggccctgtgaaacctggtctagggttccccaggtctgcaacctcaatcattagtcctgtacacctcccgccatggacaccccagttacactaccctcagccccagagtccccatcctccatccctagtcccatcagccccagtcccagcccagcccagcccagcacctttggtgacgcagctcaggatgcctccggagggctggcacacctgccccggcttgcagctgtgttcctggcacaccacgactttacccacatggcacgtgcactgctgccgacagttgtcaatgaggactgtctgctccggctgtggggagagagggaacggccatcagggacaccacgggtgggagccgactctcacatctctggcgttctggcacagaggggtttggcagacatcacagacaagggacatctctcagcaggatggccccttgtctgtgaagctgaggcacagcatggctttggggccatcattcattggttcattcacttttcttcatttactcattcattccaaaatatccactcaacgtctgctgtaggagaaatggtgtgacacagtaactaagggcagatcgcctgggcttgaagcccgtttctgctgtttccaaagtgtgtgactctgggcagttacttcacctctttatggctcagtttcatgatctgcagattgcagatgatagtagcgcctgcctttggaaatataactgagttatattcagataataaccaagttatattcagataataaccaagttatattcagacatgtaaaatttagataaaatgaaaagggtaggccgggcgcggtggcacatgcttgtaatcccagcactttgggaagccgaggcgggtggatcacgaggtcagaagattgagaccatcctggctaacacggtgaaaccccgtctctactaaaaatacaaaaaattagtcgggcgtggtggcgggcgcctatagtcccagctactcgggaggctgaggcaggagaatggtgtgaactcgggaggcggagcttgcagtgaggcaaaactgcgccactgcactccagcctgagtgacagagcgagaccccatctcaaggaaaaacaaaaacaaaaacagaaaagggtttcctttaaaacattcagataggagagatacgtggggtagacatcaaacaagatcgggagaatatggcttatttttgaagctaagtgatgggtaagtacatggacagtcattccactattctcttaatttttgcatgtttgaacgttttcagaataaaaagtttttagatatgtaatgcatatataaaaatatgcacacatagcacttaaaacggtaccagatacatagtaagcactatctacacattttctgttattattaatattatttatgtgaggagaacaacagagagagggttccacccctaggagagctcacagtccccaagggagatggacattagacaaacacatgctccagtcaaagaaaaaggacctacggggacagagtgggagagggaagtagagggtgttagcagctggtataacacatggaaatcttgtctttgtggtcagaaaggctcccttcgtccagacctggaaggcaaagccacaacttgacctggggagtcaggggagggtttaaagcttcagagcccgtggtcatatttagaaagatctttaccactgccacgtggagggtggaccagagggagcagaggtaggagctgggagggacccaggtaggagaggaccagctggaccaagggagggccatggggacggggaaaggagtgggtacaagagacactgaagagactgagtggactagctgtggtggctcccgcctgtaatgctcgcactttgggaggccaaggcaggaggatcacttgaagtcaggagttcgagagcagcctggccaatatggcaaaactccacctctaccaaaatacaaaaaaattaaccgtgtgtggtggcacgtgcctgtactcctagctactcgggaggccgagacaagagaattgcttcaacctgggatgctgaggttgcagtgagcttgaacccgagaggcggaggttgcactccagcctgggcaacagagcaagactatatctttaaaaaaaaaaaaaaaagaggctcagtgggtcgggcatggtggctcatgccattaatcccagcactttgggtggccaaggcgggacgatggcttgaggcctggagttcacgaccagcctgagcaacatagtgagacgcccccatctctatgtgtccacaggaaaattaaaaattcgctgggcttggtggtgcgcacctatagtcccaggtacttgggaggtgaggtgaaggattgcttgagccaaggaatttggggctgcagtgaactatgatggtaccactgcactccagcctgggtgacaagagtgagaccctgactctaaaagaaataaataagaggctaagtagacaggccgtggggctgatgaacagtgggaggggtgagaccccatattctgccccagatgactaggttcctacctcatagtagacaccattgtggtagcagccacattgctggatgggcacgcaggcttggccgttgtagaggaagccggagtcacactggcagccctcagcacacccatctgggcactgcagaggggcactgagagccgagcagcccagggagcaggtgtccgcacagagctcgtagtgactgttctgagggcattccatggctgcaaggagggggtgccgatcagagccctggggagggaggggctgcaaagcccagggtctaccccttctgtgcctcaagctctcccctccctgcccctccggctctccctcactcacgacagaaagtttcattcctccagggctccacgtggcctccagccgcctggcaagcactcacgtaggcatggatgttgctgcagagaatgctcaggttcccaccacccaggcagagatcaaagatgcaatctttcaagggaccctggggatccaccagcttgtggcaggaggacagtggccctgtggggctggagaggagcccacagaactcctccttctgatacttcttctccagctcgggaggacacttgtcgctggggatacagcccgcgctccccggcgggcaggtgggcggcggcaggcagggagagtcgggcaccacctcctcccaggagttgccgaactcattggcgttgcctgcctgcgagccattgggcttctggaagtcatccttggggtcgccgttgtagttcccacacaggccacacatcagctggtagtagtttccagggacggtgacccgcacatagtacacaaggtcgtaggccacacgcaggccgaagtcggtctcaatcacaacatctgaaccatgctgggaggcacggatctggccgttggccagcaccacgggcagcttcatgtccacaccgttcacctgggaggggaagagaggcaggccacgcttcagaaagtatactttgagtgagggtgggaccctagttcaagcccatgcctgatgctgatctttgtgacctcacctcttaggccctcagtttcctatttattaaatggatataataacagggcctgatagtagattgaatggtggtccccaaaagacatattcacacagaatcccatagcgtgagcttactcggaataaagttctttgcagatgtaatcagggtaataatctcaacatgagattatcctggattaaattgggccttaaatccaatgactagtatccttataagagccagaaagaaaaaggcaaagagacacacagaaaaggccacatgaagatgaaggcagggattagaatggtgttgtcacaagcccagagaacctggagtctgcagagctggaaagggaaaggaagatcccccaaccagtgtctttggagggggtgcagccctgcccacaccttgatgttgaacttctggcacccaggactgtggaacatacatttctagtgttttaagccaccaagctcgtggtaatttgttatggcagccatgggaaacgaatacaggtctcgatgaagtaacaagcctccagctatcctttgtttaccgcttgctgcagccattaataagcaatgatcgcccccggagccacttgcccgagttcaaacagtttcccccttaccctctttgtgaccttgggcaagtgagtcacctctccctgtttctgtttcctcatctatcaagtgggaataaggcgtttgccccatggaactgttgtcaggatcacataaattagtatctgtaaagtgctgagaaacgtggctggcatagcatgcatgcttcaggagcatttgctgttattagcagctatgagtggaagtttttcttctgaagagtaaacagaaccacaggtttttgctttaaagcatcagcgagtggaaagttaggctaaattcttggggaaatgaacttaaacctatgagctgaggaccagtggtttcagttaaagatttactaggctccaacaaagcctggtaaatccacccctggacagggcacagtggctcatgtctataatcccagcactttgagaggccaaggcgggaagatcacttgagcccaggagttcaaggtcagcctaagcaatatatcgagatcctgtctctacaaaataaaaaagaaaacaaattaactgggcatggtggtgcatgcctgtactcccagccactcaggaggctgaagtggtaggattgcttgagagcaggagtttgaggctgcagtgagctaggatcacaccactgcactccagccttggtgatagagcaagaccctgtctctaaaaaataaataaatacatcaacccctgattaacatgctttcttacccttccttatcacagacagtgcacaccggattcttttggaaatgtgaagaatcagaggagaaggcaggagaaagacatgctcctggctgagtctcctaaaaagatggtcaactgccacacttcccaagcagggctgggcggtgggtaagggcaactgacttagccttgcctcagtttcctcagctgtaaactgcggggtaataagagctcccacatctgtagggaagctgggggtttcagtaagaagcaactaacaagaacatcaacaactcctgtgtatttaggcgctgtatgtcaggggctattctaggagcttgggaaacattagggaatatattcaattaagtcctgcatgtcggccgggcacagtggctcatgcctctattcccagcactttgggaggctgaggccggcagatcactgagctcaggagttggagaccagactggccaacatggtgaaacccgtccccactaaaaatacaaaaatttcctgggcatagtgttgcacacctgtaatcccagctactctggaggctgaggcaggagaatcacttgaaccagggaggcagaggttgcagtgagccgagatcgcgccactgcactccagcctgggtgacaaagccagactctgtgccaaaaaaaaaaaaaaaaaagtcacgcctgtccagttcgccagattaagtcagtaattgatcagcaccttcgccaatactgccactagaaaaacagctgcgtgtctgtttcagtgggatctcaggggaaacccctccactgtaactcagatgccagtctccacatgagaccaaatcttctcagtaagaaaagcactgcagagcagcacggggttcaagctccacctttgctgggggactatgggccagtgatgggccatcccactctgaaaaataaagcaagtcatagtgcctgcagtccctgttgcaagcatacagacaccatggacgtgaagtgcctggcagccaaaaggtgtgcagtcagctgtatagaaactatagctgctgttgttgttgttaaggcggtgagagtgtcacccacagattgtcctctgtccatgaagcttctcaaactcggactttctcaacctctgatggcaccacgtcctgccaataagtggcagactagggaggtgagtagggcagaatccaggactgaggtggagagaggatggagtgggagggaggagagggtgggagaaatttggagagaaaagtcaatgcatggaggtaaagagagggtggagactgagggacagagatgggggagcagctcccaagtccctgatgacacctccctcattggcttcccactcggttctgactggcatcttctgtcctcagagaccccaggcctcgcacatgcactctcatctcttgtgcccccaactcctgggctgagcgctgcctgtgccccacctacccacaggcccctcgccccctgctccccatctgctctcaccgtgaccttccactgtctctgctccagccgcagggtgaagtttgccacctggaccgtgatcaccctggtcacactgactcgcccattaccccaggccacgttctcctgcaggacggcaaaccgatgcaggccaggccgggtgccgcaggtctgagccagcacatacacgcaggtgcccatgaagtcgaagcggtggccatcgaaggtggtgtagtggggatctcccgacgcctggcaggtggtagagcccacggccacgcagcccaagctgccaccggatggccggcaggtctcatgcgggccgcagctggagggctcacaggacacctcaccgccctcccggcagcggcaaagggaatcacacccagggccagggtagaaggtctggcccagtgggtagtagcggtcatcgtggaggcagccacactggcccacaggtacacacgtgtcaccactgagcacgaagccagcatcgcagacacagccttcacggcaggccgactcacagccctcgggtgccgacaggctcgggcagctcccaggacaggagtcaccgcagagctcgtagtggctgtgggcagggcactggaaggctgtggggacaaggtgggcatcagccaggtaggtgtttgagtcgcagtcttgggaggccctgagtgggaaaactgctcaggccaacttgggcgtctctgggcatgcacatgtgatccaggacatctaactgggggactcagcgtgggacctggaatgggaggggacatgcccaggtctctctgaccaaatatttctgaagatcaaatgactctgcttggctgatattttttttttttttttttttgagacaggctctcactctatctcacccaggctggagtgcagaggcgcaatcacagctcgctgcagcctccacctaaacctcaagcaatcctctggcctcagcctcccgattagctgggactacaggagtaagccaccacatctggctgatttattattattttctgtagagatggggtctcactatgtaagccaggcttacctgggtgaaatggatcacttatatctattcggggtatgcaggatcagaactgactatgggcatctcagcgtgtgaatgtgactggggtgtggggccacatgtatctcagggtatggctctgcctgagggcacccagctgtgggtgtctgacatgcagcatctcccagagtccttctgacatggtctgcctaaggctgtgcctgggtgaagttggcaggatacctgtgaccaggagacctgcctgaagggaaccgcctaggactatctaactatgcatctgtgtggatctgcccaaggctatgccaggatcctgtttctttctgagtgtatctgaccagtcagtataaaatttaagcagatatcactgaaggtatgcgactaattccatgtgactaggtgtatttcagtgtgtgcaacagacctgggccctctgaccagctgaaactcactaggtcttcctaacaaggggtactttgctatgtgacagaggcagggtcagccatcccaatctacatgccttggatacctgaaagcatggatcaccaatccctaagagtgtcctggaccccaggtttcttttctttctttttttttttctgttgtttgttgtttgtttgttttttgttttggagatggaatctctgtcacccaggctgaagggcagtggcacgatctcggctcactgcaacctctgcctcctgggttcaagtgattctcctgcctcagcctcctgagtagctgagattacaggtgcccgccaccacgcccggataatttttgtagttttagtagaggtggggtttcaccatgttggccgggctagtctcgacctcctgacctcaggtgatccgcccgcctcggcctcccaaattgctgggattacaggcgtgagccaccgcgcccacactctgactaggtgtttctaactgactctctctcactgcagtacctgacttggggcatttcagtgtgtcagtgccaaggtgtttcctgacagtagataccgagctcgggaaggaaagtggcccctgagccccatggaggaggaaggggctgctgtcctacagtcctgggaagggcagggagagacccaaccatgtggaccatgcatggagcagtactcacgacagaagtccggccgcctccactcgcggagctgggccccagcggcctgacaggctgccacgtaggtggccactgcaggacagaggcctccaggatggccctgaacttggcaggcgtccagcaagcagccctggaagtactgcgcgggcggcacaaggccgtggcagggcgccagcgggccgtcggtggcggagatcacgccgcaggcgtccgggccgccgaaggactcttgctgctctggggtgcacggcgacgggcatggcttggacacacattccccgcagccctgggcgccgcccacctgccatccggcgggcttcccgcccaccgccttcaggtcgtctgcggggtcctggttgtagttcccgcataagccacagagagagcccgcgtacgccgccggcacgcgcaggcgcacgaagctgtccccatcgaaagccagcgagagccctgaggttgtggtcaccaccacgtcggcgccgctcaggtgtgcgtgcaggagcgagtccagctggaagggcagagtgacgaacacgccgtccacctgtgggcagtgggggagcggtgaacggagcaaacacgggtttgaatcctggccccactacctactagctgtgggacccagagcatgtcacctcccgctgaaaataataatgagcatctataggccgggcctggtggcaaagcctgcaatcccaggactttggaaggccgagatgggaggatcgcttgacgccagaagttcagatcagcctgggcaacatagtgagacccccatctctacaaaaaaatgaaaaattagccagcgtggtggcgtgtgcctttagtcacagatacttgggaggtggaggccaaggcgggaggatcgattcagcccacgagttccaggctgcagtgagccctaatcctgtcactgcgctccagcctgggcaacagagtcaggctaagaaaagaaagaaagaaagaaagaaaagcaagaaagaaaaaaagaaaagaaaaacaaagagcctctactggctcatgtcactgactccttatccttctcgaaaacaggtacttttcctagaccagtttacagaggaatacactaggctcacagaggaagaagctgctgtgccaagccatcaggctcctaggcgtacactctgacccttccatcatgccccagctaagctgtgaaaggggcccaggggaatggtgaagcccttaccatctcaggcaaccccagagctggcacttgctcctgtctggcccacagccctcctcacctgtagcttccggggccagcgggcactcagtgtcaggctgtggttgtagatttgcagggtgacactgcgggtgtagctgacagcctggctgccccggtgctcattggctacagtgacagtgaagttctcagcccccaagggtggtccgtggcagggtgcactcagcaggtactcgcaggtgccttggaaatcgaatcggtgcccatccagagtgacgtaatgggggtcaccccacgcctggcactcagctgtgctgacgggctggcagccgtgctggccggatggcaggaggccacacacttcacccagcccacagctggcaggtgtgcagaccagcgagccacccccaggcccgcagcgacaccactgggagcaggtgccatcagcccaaaactcactgcccgcctcgtggtaggtgccattggcccagcagccgcagccgttgttgaggggaacacagcggtcagcacttaacacgaaacccgcgtcgcactggcagccctccacacaggggccctcacatacggctggcgtcgtaaggggtgcaggggacggacagctggccgggcagggtgggccacagacctcatagtggctgttttctgggcaggtgatctctgtgggcagatgaaggagcaggaaggagagaaacagaaagaagggtgttaggggtggggtcccagaacagggtgggaggagacagagagagacactagggagcagacagagaaagggggagacagaaaacaagacacagagagaggacacagagaaagaaatgggagagggcgagacaccaggagacccaagcagaaactgagggagctagagaatgagaaacagacagatagagacaagcaaagcgaggcccagagacgagcaccaagaaacagagagacaaacagagaaaaaagaaaacaaagagacccagaaggaccagagtgaaaccaaaccagccccgaagagatgggaccccgcccccagccccgcctctgctcccccaacactcaccacagccaacctgtgcccgccagtcttcgatgacaaccccagcagcctggcaggcggccacataggaagccagagccttgcaaagaatgtcacggtccccaccacccatgcagacgtccagaacacagcccttgaagaagctctcaggtggcacatgagcatggcaggtggtgaaagggccccctgtgccgggggccaggggtccgcagaagccagggccctcgtactgctccaaccggtcctcagggcacgttgggcaggacccccgacattcgtcccaacacagtgggtcccagcctggggctcgccagctgccgccccagatgggtatggagggagccagtgtgccattagggaagacctggtcattgttggggttgcggtccatgttaccgcagagcccgcacactgcgccatgatagctgctgggcagcgtcacgtctacccgccagttccagtcatagctgacttgcagtccaaagtcagccaccagcagtgccttcgatgcaccctgggtcactgaaatccgcccgtcggccacagagacaggcaaggctgtgagcacaccgttcacctgggggaaggagggaaggcaaacgggtcactggaggttttacggccccagctctggccctctgcctccctctctctcatcccaccgggggctgggagaggccagggccttcccccgagagttggattgtcatctgacacactgtggacagttgttctagcccaggtcttggggaacgaaacctcactttactttttctagatcttctcccttcatctctatctccctcccctgtctctgtctctctctctgtgtctctctccctctgtcttcacctaaggctatgcctctgggtcttctctctctctgtctctgtctctctctctctctttctgtctctctgtctctgtctcacccttttcccttcctccctacctccctcattctttgtgcatctcttccactcactcaccatcatttattcagtgcctactctgctgcatccctcagtctctccatgtgagctgccatcaagctacatctccatttccttgggcagaaaggatagcccattcctctcccccatctccctatatttctttttcttgattactttttttatttttcagacggagtctcactatgtcaccgaggcttgtgtgcagtgttgcagtctcggctcttgtaacctctgcctcccaggttcaagcaattctcctgcctcagtgtcctgagtagctgagaattcaggagcatcaccacacccagctaatttttgtatttttagtagagacggaatttcaccatgttagccaggcttgtctcgaactcctgacctcagatgatccatcggcctcggtctcccagagtgctgggattacaggcgtgagccaccgggcccagcccagtctccctgtatttctctccatgtcctggtctctgggcctctcacttttccctcaccgacactcaaacgactgttcacctggactagactctgagctcagcatgtgacatgcacggccttgctgtgggggaggccctgatacgatgcccacttcacagatgaggaaactgaggcctaccaagtgaactgcccagcatcacatagctcataaggaggagaggctggattgaaacccaggtctataaaaaaggcaaatgctgaggtcctatgttaaagccctttgccaggggctaggctcatttaattcccagtaacagggtgatatttttgttgcaattattctctttgttgacagtttgtttcaggcccaggtgaagacaaagagccttgagctgctaactgtggtcgtcaggatccctcctgccctcccggggacctcaggggaccatcctgccacacatacccggactttgccgatctcgtccttgtggatggagatgttggtgccgagggcagccacggtgacgactctcacgtaggacacagcagggttgccccggttctggttcttggtggtgacggtgaagggtgtcaggccctgggtgctgacccccgggcagccagttgttgccagcacatagttacaggtgccctggaagtcaaacttccggccatcgaaggagtggtagtgtgggtcgccccacagccagcacgtggcctcatagttgggcaggcacacgccctggccaccctgctccttgcatgtctcctgtggccggcatgtcacgccgtggcacgggtctggggacagaagagggaggaggaccttgaggggctgcccattgtaaagcatggccgctccctccacatctacccagtctgtgccagggatctgagggttactgcaggcaagaccacattacagagtcctcatgtctaggacccacttcctatagtttgcttttacattttcttttgttttgttgtttttttgagatggagtctttctctgtcacccaggctggagagcaatggtacaatctcggctcactgcaacctctgcctcctgggctccagtgattctcctgactcagcctcctgagtggctgggattataggtgcccaccagcatgcttggctgatttttgtatttttagtagagacagggtttcaccatgttggccaggctggtctcgggctcctgacatcaagtgatcagccaaccttggcctcccagagtgttgggattacaggcatgagccatcatgcccagcctgctattttcaagaccagcccctgggagtcccacacagctgacactgaggccccatgggggactgtgtctaagtctcggctgtcaaaggtcccatacctgagacctgggccccagaggtctgtacagccaagacccagtacctagagttcccctacttctgagactgaggccctgccatttgctgtgtgagactgagatcctggagtccacgcacctaagaccaaggtaaagaccaaggctctgggtctgtgtttaaggtgcactttccatggtgcccttgcttgagatttcaccctgttcttgtattttaagttttataggaacctcaccgtcttcacttacataggctacggctgctttcacaccacagtggcagagtgagtagttgtgatccagaaggtatagcctgcaagcttaaacacttaccatctagccctttagagaaaaggtgcacttgaccccagttgagatctgtgccccaggggtccttgtgtctgcgatgccagccctgagagcatccatgtctgagatcccagccccagggttctctgtgttcaagacctgggccccaggccaggtgtggtggctcaggcctgtaatcccagcactttaagaggctgaggtgggaggatagcttgagccctggagtttgagactagcctgggcaacatagtaagaccccatttctacagaaagattaataaattagccaggcgtggtggtgtgtgcctgtagtcccccactactcgggaggctgaggcgggaggattgtttgagcccaggaaatcgaggctgcagtaagctacactacactctagcctgggccacagagtgagaccttagctcaaaaaaaaaaaaaagatctaggtctcagggtcccccatgcctgagacctcagccccctggacatctccacatttgatagaaattggtctccaatttctctaggtcctggaggcctctgtgcccaagactagggccctggggtgatcttctggcaagagcccagtgccagggtctcagcaggatttgaaatgtttgagaccctaactagctaagtctcatgggctgggctccctcagtgcaagactccatccctgagggttgctgtattcaagacagtagccttgatcgtgtctcactgctgaggccctgtcctggggggtttctgtgtccgagaccctgttcgtacagttactacatctgtgaccccagcttgcggaacccctgtgtgggagaggccagccttcaaacgtctccttcctcctgtgtccattatctatgtaccgcctctcagcttcaaatacacccacggagttaagctttgtcaacagagggcgccggagagtcactgcaggagggacggtctcctggtctggcttctagccagtttggtccttccagctctggccagggtgcggggccacattcagcgagtgccactggccgcagctggcttcccagtgaggggttcccttcttgccaagtccagcctgcagaaacctctgtgccacccagtgggctacagctgcagtgagactggactcagccttggggctgattctcccctccttgaagagtaggggccaatttctcccttccatgaggcttttaccttagccctagagtggcggctacttcctgtgtgtgctttggtggtattctttagtgctctctttaccgtttcttatttctgtttatttgtttgtttgtaaagagacaaggtcttgctgtcttgcccacgctagagagcagtggtgcaatcatatagctcactgcagcctcgaaatcctggggtcaactgatcctcctacctcagcatcctaaatagctgggaccacgggcacgcatcaccacacctggctaattttcaattttttgtggagacaggggtctcgctatgttgcccaggctggtctcaaactcctggcctcaagtgatcctcccaaagttctgggtgtgtgagccacggcaccagaccctctttacccttaatagttaatctcctattaataagtaagtgattctttaattaaactttcctcattcaaatggccatacgctttctgtctctcgactagatgctgagtgatataccccccatttctgggagtccccattatcctgctcatcagccctgagagtcttagcccccactccttggtgctggagctcccattctcttatccttagggggaggagagttctctgctcttcaccctaagaaatgagccctgggggtggctgtgtcccagatttagtctgggggattcccacatcagagactatacccccagaaatcctgatcttccagttaagaggggtccccatatccaatgtcctgccttggtgaggtctccgtgcgtgagactcagaactctgctctctgtccctgcccctgggatcccagtctctcccctgccctttggtgctagtgtctgaaccccaagtccaatcccacacatcagtgttccgctcatgatggccccctaggctgctgctcttgtattctaaagtcttataggagcctgacctcttcacttacatagtctacggctgctttcatgccacagtggcagagtgagtagctggaacgagaacctacagcctgcgagcttaaacatttaccatgtagcacattagagcaaaggcgcgcctgtccctgccttataccgagggtctctgacatccaccctgagaaaactatctctgagggtccccacagcctggattttccctaagggtccctacctcccaaagtaggtggccctggccctgtgaaacctggtctagggttccccaggtctgcaacctcaatcattagtcctgtacacctcccgccatggacaccccagttacactaccctcagccccagagtccccatcctccatccctagtcccatcagccccagtcccagcccagcccagcccagcacctttggtgacgcagctcaggatgcctccggagggctggcacacctgccccggcttgcagctgtgttcctggcacaccacgactttacccgcatggcacgtgcactgctgccgacagttgtcaatgaggactgtctgctccggctgtggggagagagggaacggccatcagggacaccacgggtgggagccgactctcacatctctggcgttctggcacagaggggtttggcagacatcacagacaagggacatctctcagcaggatggccccttgtctgtgaagctgaggcacagcatggctttggggccatcattcattggttcattcacttttcttcatttactcattcattccaaaatatccactcaacgtctgctgtaggagaaatggtgtgacacagtaactaagggcagatcgcctgggcttgaagcccgtttctgctgtttccaaagtgtgtgactctgggcagttacttcacctctttatggctcagtttcatgatctgcagattgcagatgatagtagcgcctgcctttggaaatataactgagttatattcagataataaccaagttatattcagataataaccaagttatattcagacatgtaaaattcagataaaatgaaaagggtaggccgggcgcggtggcacatgcttgtaatcccagcactttgggaagccgaggcgggtggatcacgaggtcagaagattgagaccatcctggctaacacggtgaaaccccgtctctactaaaaatacaaaaaattagtcgggcgtggtggcgggcgcctatagtcccagctactcgggaggctgaggcaggagaatggtgtgaactcgggaggcggagcttgcagtgaggcaaaactgcgccactgcactccagcctgagtgacagagcgagaccccatctcaaggaaaaaaaaaaacaaaaacagaaaagggtttcctttaaaacattcagataggagagatacgtggggtagacatcaaacaagatcgggagaatatggcttatttttgaagctaagtgatgggtaagtacatggacagtcattccactattctcttaatttttgcatgtttgaacgttttcagaataaaaagtttttagatatgtaatgcatatataaaaatatgcacacatagcacttaaaacggtaccagatacatagtaagcactatctacacattttctgttattattaatattatttatgtgaggagaacaacagagagagggttccacccctaggagagctcacagtccccaagggagatggacattagacaaacacatgctccagtcaaagaaaaaggacctacggggacagagtgggagagggaagtagagggtgttagcagctggtataacacatggaaatcttgtctttgtggtcagaaaggctcccttcgtccagacctggaaggcaaagccacaacttgacctggggagtcaggggagggtttaaagcttcagagcccgtggtcatatttagaaagatctttaccactgccacgtggagggtggaccagagggagcagaggtaggagctgggagggacccaggtaggagaggaccagctggaccaagggagggccatggggacagggaaaggagtgggtacaagagacactgaagagactgagtggactagctgtggtggctcccgcctgtaatgctcgcactttgggaggccaaggcaggaggatcacttgaagtcaggagttcgagagcagcctggccaatatggcaaaactccacctctaccaaaatacaaaaaaattaaccgtgtgtggtggcacgtgcctgtactcctagctactcgggaggccgagacaagagaattgcttcaacctgggatgctgaggttgcagtgagcttgaacccgagaggcggaggttgcactccagcctgggcaacagagcaagactatatctttaaaaaaaaaaaaaaaaagaggctcagtgggtcgggcatggtggctcatgccattaatcccagcactttgggtggccaaggcgggacgatggcttgaggcctggagttcacgaccagcctgagcaacatagtgagacgcccccatctctatgtgtccacaggaaaattaaaaattcgctgggcttggtggtgcgcacctatagtcccaggtacgtgggaggtgaggtgaaggattgcttgagccaaggaatttggggctgcagtgaactatgatggtaccactgcactccagcctgggtgacaagagtgagaccctgactctaaaagaaataaataagaggctaagtagacaggccgtggggctgatgagcagtgggaggggtgagaccccatattctgccccagatgactaggttcctacctcatagtaggcaccattgtggtagcagccacattgctggatgggcacgcaggcttggccgttgtagaggaagccggagtcacactggcagccctcagcacacccatctgggcactgcagaggggcactgagagccgagcagcccagggagcaggtgtccgcacagagctcgtagtgactgttctgagggcattccatggctgcaaggagggggtgccgatcagagccctggggagggaggggctgcaaggcccagggtctaccccttctgtgcctcaagctctcccctccctgcccctccggctctccctcactcacgacagaaagtttcattcctccagggctccacgtggcctccagccacctggcaagcactcacgtaggcatggatgttgctgcagagaatgctcaggttcccaccacccaggcagagatcaaagatgcaatctttcaagggaccctggggatccaccagcttgtggcaggaggacagtggccctgtggggctggagaggagcccacagaactcctccttctgatacttcttctccagctcgggaggacactcctcgctggggatacagccctcgctccccggcgggcaggtgggcggcggcaggcagggagagtcggacaccacctcctcccaggagttgccgaactcattggcgttgcctgcctgcgagccattgggcttctggaagtcatccttggggtcgccattgtagttcccacacaggccacacatcagctggtagtagtttccagggacggtgacccgcacatagtacacaaggtcgtaggccacacgcaggccgaagtcggtctcaatcacaacatctgaaccatgctgggaggcacggatctggccgttggccagcaccacgggcagcttcatgtccacaccgttcacctgggaggggaagagaggcaggccacgcttcagaaagtatactttgagtgagggtgggaccctagttcaagcccatgcctgatgctgatctttgtgacctcacctcttaggccctcagtttcctatttattaaatggatataataacagggcctgatagtagattgaatggtggtccccaaaagacatattcacccagaatcccatagcgtgagcttactcggaataaagttctttgcagatgtaatcagggtaataatctcaacatgagattatcctggattaaattgggccttaaatccaatgactagtatccttataagagccagaaagaaaaaggcaaagagacacacagaaaaagccacatgaagatgaaggcagggattagaatggtgttgtcacaagcccagagaacctggagtctgcagagctggaaagggaaaggaagatcccccaaccagtgtctttggagggggtgcagccctgcccacaccttgatgttgaacttctggcacccaggactgtggaacatacatttctagtgttttaagccaccaagctcgtggtaatttgttatggcagccatgggaaacgaatacaggtctcgatgaagtaacaagcctccagctatcctttgtttaccgcttgctgcagccattaataagcaatgatcgcccccggagccacttgcccgagttcaaacagtttcccccttaccctctttgtgaccttgggcaagtgagtcacctctccctgtttctgtttcctcatctatcaagtgggaataaggcgtttgccccatggaactgttgtcaggatcacataaattagtatctgtaaagtgctgagaaacgtggctggcatagcatgcatgcttcaggagcatttgctgttattagcagctatgagtggaggtttttcttctgaagagtaaacagaaccacaggtttttgctttaaagcatcagcgagtggaaagttaggctaaattcttggggaaatgaacttaaacctatgagctgaggaccagtggtttcagttaaagatttactaggctccaacaaagcctggtaaatccacccctggacagggcacagtggctcatgtctataatcccagcactttgagaggccaaggcgggaagatcacttgagcccaggagttcaaggtcagcctgagcaatatatcgagatcctgtctctacaaaataaaaaagaaaacaaattaactgggcatggtggtgcatgcctgtactcccagccactcaggaggctgaagtggtaggattgcttgagagcaggagtttgaggctgcagtgagctaggatcacaccactgcactccagccttggtgatagagcaagaccctgtctctaaaaaataaataaatacatcaacccctgattaacatgctttcttacccttccttatcacagacagtgcacaccggattcttttggaaatgtgaagaatcagaggagaaggcaggagaaagacatgctcctggctgagtctcctaaaaagatggtcaactgccacacttcccaagcagggctgggcggtgggtaagggcaactgacttagccttgcctcagtttcctcagctgtaaactgcggggtaataagagctcccacatctgtagggaagctgggggtttcagtaagaagcaactaacaagaacatcaacaactcctgtgtatttaggcgctgtatgtcaggggctattctaggagcttgggaaacattagggaatatattcaattaagtcctgcatgtcggccgggcacagtggctcatgcctctattcccagcactttgggaggctgaggccggcagatcactgagctcaggagttggagaccagactggccaacatggtgaaacccgtccccactaaaaatacaaaaatttcctgggcatagtgttgcacacctgtaatcccagctactctggaggctgaggcaggagaatcacttgaaccagggaggcagaggttgcagtgagccgagatcgcgccactgcactccagcctgggtgacaaagccagactctgtgccaaaaaaaaaaaaaaaaaagtcacgcctgtccagttcgccagattaagtcagtaattgatcagcaccttcgccaatactgccactagaaaaacagctgcgtgtctgtttcagtgggatctcaggggaaacccctccactgtaactcagatgccagtctccacatgagaccaaatcttctcagtaagaaaagcactgcagagcagcacggggttcaagctccacctttgctgggggactatgggccagtgatgggccatcccactctgaaaaataaagcaagtcatagtgcctgcagtccctgttgcaagcatacagacaccatggacgtgaagtgcctggcagccaaaaggtgtgcagtcagctgtatagaaactatagctgctgttgttgttgttaaggcggtgagagtgtcacccacagattgtcctctgtccatgaagcttctcaaactcggactttctcaacctctgatggcaccacgtcctgccaataagtggcagactagggaggtgagtagggcagaatccaggactgaggtggagagaggatggagtgggagggaggagagggtgggagaaatttggagagaaaagtcaatgcatggaggtaaagagagggtggagactgagggacagagatgggggagcagctcccaagtccctgatgacacctccctcattggcttcccactcggttctgactggcatcttctgtcctcagagaccccaggcctcgcacatgcactctcatctcttgtgcccccaactcctgggctgagcgctgcctgtgccccacctacccacaggcccctcgccccctgctccccatctgctctcaccgtgaccttccactgtctctgctccagccgcagggtgaagtttgccacctggaccgtgatcaccctggtcacactgactcgcccattaccccaggccacgttctcctgcaggacggcaaaccgatgcaggccaggccgggtgccgcaggtctgagccagcacatacacgcaggtgcccatgaagtcgaagcggtggccatcgaaggtggtgtagtggggatctcccgacgcctggcaggtggtagagcccacggccacgcagcccaagctgccaccggatggccggcaggtctcatgcgggccgcagctggagggctcacaggacacctcaccgccctcccggcagcggcaaagggaatcacacccagggccagggtagaaggtctggcccagtgggtagtagcggtcatcgtggaggcagccacactggcccacaggtacacacgtgtcaccactgagcacgaagccagcatcgcagacacagccttcacggcaggccgactcacagccctcgggcactgggaggtctccacaggacagcgggcagccgtaggaacacgcctcatagtggctgtggggtgggcagctcagtgctgcagggagaggagacatcaagatcaagaattcctgctcccaggtcaggagttcgagacacactcacatacaagtggtccctcaacacattcgtatgcacacaaacactcaaacacactcacacacaagtggtcccccaagacattcatatgcacacacacgctcaaacacactcacacacacacaagcggtcccccaacacattcgtatgcacacacagatgctcaaagacactcacacacaagcggtcccattgcagggtgcttggggaacacattacatcgcagttaatctgatcctgataattaagattctttcccaatttaactatggtttggagttatctattatggttttttttttttttgagataggggtcgctctgttactcaggctggagcgcggtggtgcttgctatcacagctcactgcagctttgacctcctgggctcaagcaatcctcccacttcagcctcctgagtagctgggactataggcgtgcaccatcatgcctggctaactgttcaaattttttatagagatgcggtctcgctatgttgcccaggctggcctcaaactcctgggctcaagcagtccacctgcctcagcctcccgaagtgccgggattgcaggaatgagccaccacacccagccttctattatgtctttaatgaccttattcaagttggatacatggtgttgatatgtggcatatattttaaacatgcatatgcatatatttctgtgtttgtataatctatgcaatatttgtgaatgcaatacttttagcttcttccttctatagcagtaattaaaatatttagccagtgttataaagaaaaaaagaaaaacctccctgctcccctccccaaactccagtcactccataaaaagcaaatctaagtgactaaaactaaaccacattaaatctctatctgtgctgtcaaatacagtagccactagccacttgtgaccatttggatgtaagttaattaaaatgaaacaaaattgaagatttagctcctcagtcacaacagcctcattgcaagtgctcagcagccacatgtgacctgtggtgacctggtatgtatttgaacagctcaaatatggagctgtcatcattgaagttctgctgggtggtgctgttctgaagctgacatccagcttacaggagaatcatggggacatagggacaagttcaataacactccaaaatagcaactagccagatcctgaaagtatgaaattctgcaggataaataacctatctttcccagtaaataagtgacatagacaaaaggaagagctggatggagggatagctatgtgataaggcaaatgaatgaattagaattagagtgaagaggccgggcgcggtggctcacacctgtaaccccagcatttttggaagccgaggcaggaggatcacttgaggtcaggagttcgagaccagcctagccaacatggtaaaacccgtttctactaaaaatacaaaaattagctgggcatgatggcgcacatctgtaatcccagctacgtgggaggctgaggtgggagaatcgcttgaacccgggaggcggaggttgcagtgagctgagattgcaccactgcactccagattaggcaacagagtgagactccatctcaaaaaaaaaaaaaaagaaagaaagaaagaaagaaaaaagaaaagaaaaagaattagagtgtagagtccaggtggtaggtttatgggtcttcactgtaaaattctttcaacttttttgtatatttgacaattttcataatactatgttgggaggaacaaaggaaggaaattctgacagagtaaaagcaaagaggtagatcaatccaatgcagtatgtgtatttggtttggttctagagccaaacaaaatagaaaaaaacctttttttttttttagacaattgggaaaatttgaacccagattgggctttacatgatgttagggaattaatgttattgttgttactggtaattaccacatgccctcatatctctttctttcttccttcctttttttttttttttttttagagacagggcctcactggagtgcagtggcacagtctcgcctcactgccacctccacctcctgggctgaagatattctcccaccttagcctcctgagtagctgaaatgataggcactagtcaccatgcccggcttattctttatttttatttttgtagagactgggttttgctatgttgctcaggctggtcttgaactcctggcctccagcgatccttccacctaggcctcccaaagtgctgggattacaggcatgaaaagcaaactcctgtgccttaaaagtccttttttgttgctgaaaagcagatgcttactgaagtagttagaggagaactgatctgcctagaatttgatctaaaatattctaccaaaaaagagggggtggagtgagaggtagaggaactaagaatggcaaaataccaataattgttcaagctgggtcaggcctccgtctgcatatctaagacctcatgatccagtcttctagaacttccaggtggtacaaggaaaggagtagttttaaggaaacaagagattctcaatttccacacaggccacagagtctgataattaacagcacaaaatcaggagccagcctgttcaaatcaccccaccggctgtgtgacctcaggctagttccttaacatctctgtggttcagtttcctcgtcttgtaaaataggaataagagcaattctgcctcacggggtggttgtgaggattcaatgagaaacccttagaacaggacctgcccagtgggatgcgtgtcacacaactgctagctggaattatacgtgtcctgcctaaaaggacagcccaagaatgctctgttagaagagcattcccacttcccattgtccacctgtccccttcacaagtgtgcttcctgcactttacagaagagaacagtgcagtcccccacccatcctgaatctttttttttttttttttgagacagggtctcgatctgtgggccaggctggagtgcagtggtgcgatctcggctcactgcaatctctgcctcccaggtttaagctaagattctcctgcctcaacctcccaagtagctgggattacaggcgctcaccaccaggcctagctaacttttgtattttttgtagagacagggttttgccatattggccaggctggtctcgaactcctcacctcaagtgatctgcccgcctcagcctcccaaagtgctgggattacaggcatgagccaccacacccagccccatcctgaatcttaacacatggcacagtgccctggagtgtgaaacctctgaggacataaacggacgatttcaaatattgctatcgctgtgaacacaacgaatgctgaatcattattgagtaataaatcaaaaggagggcctaatagaattggctgctcacagataatataaaataaatttgtcgtgtctcactgtgtgccttccctatgactcagaaggggttcagagcacggagtgatgttactccacctgcactctgtccactcccacccacttattaatatcatgtaagccaggagctgtggctcaagtctgtaatctcagcactttgggaggccaaggcgggaggaaggcttgagcccaggagtttgagaccagcctggacaacatagcgagatcttgtgtctacaaaaaataaaaaattagccaggcatggtagtgtgcacctgtagtcccagctactcaggaggctgacacaggaggactactcgagcccaaagatggaggctacagtaagctgtgatcacaccactggactccagcctcggtgacaggataataccttatctcaaaaataaataaatatcatatctacaaaaatgaaagataggattagaattgatgctgaaccctgtctcattctaacaatatatgtgaaatattgggtgggggtaagctcactgagtgatgccattacaatggccattacaatttacttctgtttaatatttttatcaattgtgcacaaacaattcttgcaatgatatcttactccattaaaaaaaccacttagagtcttagagtctcaggaatttctaaaacttcttatatcttttataagaaggctgttttgtcctgggaggtttcacaccccagggcaacatgccacgtgttgagatttgggatgagtggagactgcactgttattattttattttattttattttattttattttattttttgagacagaatctcgctctgttgcccaggctggagtgcagtggcttgatctcggctcgctgcaacctctgcctcctgggttcaagcgattcttctgcctcagcctcccgagtagctgggattataaaaattctgaaatcttagtcatagatgtgtatgtttgtggcagagaagtgtgatggcgattgtgacacaggctgccaatggtcacgtcttgactctgggcatgaccatggcacttgctttggccaatgggacattggccaccatgataccaagtagagccttggaaagtgcttgcacactggggcttgtgtgctcttaggaatcttgagagcaccttgggaagaagccttggctcacctgctggaagatgagaccaagtagagcagagacaagaattcccagctgagggccccccaaaccaaccagcttgacaactgccagatgtgtaaaatcaccctagattacccggccttggctgagcctccaacagactgcagagatcaaccaagctggcccaggctgggagaacagctcagcagcccccagaatcatgagaaagaataaatacttggccgggcatggtggctcacacctgtaatcccagcactttgggaggctgaggcgggcagatcacctgaagtcaggagatcgagaccagcctggctaacatggtgaaacccccatctcttctaaaaatacaaagaattagccgggcatggtggcacatgcctgtaattccagctacttgggaagctgagacagaagaatcacttgaacccaggaggcggaggttgcaatgagccgagatcacaccattgcactccagcctgggcaacagagcgagactccatgtcaataaataaataaataaataaataaataaataaaaataaacacttgttttaatgcactcagccactaagccttgggttgtttgttaggcaccaaaagccagctgatacagtgactttaacaaaagacttccatgcattcaaatgtgttacattaggttaaattctgttagaactaaaaagcattagaaaatcagttcagaaaggcaaggatttgttttcttattctctcccctattgtatccggagtgtttagaatagtgcctggaatacagaaggtatttttgaatgttttggatatttgttgaatgaatgaatgtaagttgaaggagaaaaaggaatgatgtatttatcctgtatttttcagtggacaatgatgtgtaccactgtgtgctatgtatctgttgaatacatttaaaagaggagcataagtcaagtaatggtttcattttgaaataccaatattatgttgataattgtggaaactaaatgatggatatatgctggctcactatcctagtttactttggatatgtttaaatttttccctaataaaaatgttcttaaggccatgagcagtggctcacgcctgtaattctagcactttgggagaccgagttgggcggatcacttgaggtcaggagttcgaaaccagcctggccaacatggtgaaaccccctctctactaaaaataccaaaaaaattagccaagcatggtggcgggcgtctgtagtcccagctacttgggaggctgaggcaggagaattgcttgaacccaggaggcggaggttgcagtgagctgagatcgtgccactgcactccagcctgggtgacagagtgagactccatctcaaaaaaaaaaaaaaaaaaaggttcttaaaagtcaaaagttaccatttgttagaaattataagttttatgattatttcaggtgaaaaactagacatgtatgcttctattaattccaaaattcaaaaactttagaagtcagaatagtggttacctcttggggttgggaacctggattttttttttttcttgaatttgggacagttcacacaggtttgttctcttggtgaaaactgatcaagctgttagcttatgatatgtacatatttttaaatatctgtattatatttcaataataaattttttaaattaaaaatcgggtgagaggaaactggtacgatggctcacacctgtcatcctagtattttgagaggccgaggcaggaggattgcttgagcccaagagcccgagaccagcctgggcaaaatatcaaaaccctgtctctataaaaaatattttaaaaattagcgggggatggtggtgcaagcctgccgtttcagctactcaggaggctgaggcaggagaatcgcttgagcccaggagttccaggctgcagtaagctatgattgcaccactacactccagcctaggcaacagagcaagaccccatcttaaaaaaaatcaggtgagaggatgcatggcttttcaaacttctttcataggcaagcaaaggtgttggaaaaccattcatgcacccacctctgaaacaaggctctcaaactgactgcccaaggggtcaggcagatgtaaataagcgaggtaggatagatggggaccaaaaagaaccagagaggggatgagactcctaatgacaatactgttgctcatatctcaatgacagctgttatgtgggaatcagaccctgggccaccaggtgtactcagtcattttacaaataccaactgccgctgggcacggtggctcacgcctgtaatcccagcactttggaaggctgaggtgggcggatcacgtggtcaggagatcgagaccatcctggccaacatggtgaaaccccatctctactaaaaatacaaaaattagctgggcttggtggcgcatgcctgtaatcccagctactctggaggctgaggcaggagaatagcttgaaccagactcagaggttgcagtgagccgagatcatgccactgcactccagcctggtgacagagcaagactccatctaaaaaaaaaataccaactgcatgcccaccatctgtgattttctagctatcatgatcccaggtgtgtaactgaacctttctgaacttcaatttcttcatctgttaaatgggtataaccacaatccctacctcatagggctattataaggattaaatgaattaatgatatttatacattaatgaatatatataaggctgagtcccccagttgccacttccgatactcacggcaaagttcttcactcctccaggggtgcactgtggctccagcagcctggcatgcagcagcataggtggccagtgcgtcacacagtggcccagactggcctggcagcaggcagcggtcatagacacagtcgcgcacggcaccctgggggtccagcttgctatggcactcccggaagggccccttggggtcggcaaggattccacactcattcttgctctgcagctgctgggccaccagggagtccagcttgggacagtcacccggttcagttgctccacagccgggcctcgtctcttcttgccagctgttcccaaaggccagtgcattggcagcttgacccccaccccgcagagccaggtcatcagctgggtccccgttgaagttcccacagagtccacacagggcctcagcatagctgctgggcaccttggcagtcactcgtgcattccagtcataagtgacagtcaggccaaagtccgtgcgcacgacggcatccctgccctgtcggaacacctgcacctgcccatctgctgcttggaagggcagatactgaaggacgtcatccacctgggtggagatgcaagagggccacctggtcagggtattcacagttctgtggcccacccttcaattcactcacctccagctaccctgacctccttgctattctcttggacatattacgctcagtcccacctcgaggcctttgcacttgctgttccctctgcctggctcaccattcacccctcttcattcctaaagcaccagcttaaatccaaatccctcacccatggccttcaaaacctacatgatctgtctatctccccattacctccctcgcctcacctcttctcactgtccctctcactcaggctgctgcaaccatactagctttcttttctttttttttttggacagggtctcactctgttgcccaggctggagtgcagtggcacaatcttggctcactacaacctctgcctcctgggttcaagcgattctctctcagcctccctagtagctgggattacaggtgtgagccactgcacctggctaatttttttttctatttttagtagagagggggtttcaccatgttggccaggatggtctcaaacctcagatgatccactcgcctcagcctcccaaaatgctgggattacaggcgtgagccacggtgcccagccactagcttcctttttaaaatagagacaggggtctcactctgtcacccaggccagaatggagtggcacgatcatagctcacttcctagcacttcaggaagctgaggcgggagggtcacttgagcccaggagttggagaccggcctgggcaacttagtgcgactccgttctgcacaaaaaggaaaaaggaaaacgaaaaaaataaaatcttctaacaggcctcccccaccctcaggcccatccagaactccaagtcttcagagggtatttcctgctccgtcacccagccctgggcgccacgtcgctcaccagcacttgcccggggtactcccggcgcacggccaccttcaccccgcgggcctccacccgcacggcgcgcgtgtagctcacagtctggctgccccgatgctcgttttccaccagcacccggaaggcaggcagcgctgcgttctggccgcatgagccgaccagcaggtacgtgcaggtgcccatgaagtcgaagcgccggccgtcgaagctcacatagtgtgggtccccggacccctggcaggtcccgaagcgatcggggtagcagcccaggaggccgttctggacgctgcagcgctcacccgccgggcagctctgcttgtcgcggcaggtgacctgatgggtggcgccgttgcaggtgcagcgcctttggcacaactcgtccgcccacacttcctggcccggagcgagctggagaccctggaaggtgcagccacacgacgaggccggcacgcaggcgccgccgctggccacgaagcctgggaggcacacgcagccctccacgcaggggcgcccggagcagttggacggcgccgcagccccgttgcaggaggtcgggcaagcagggccgcagagctcatagcggctgttggcagggcaggacagggctgcggggagatcagagagggtggatcaggcccgcgtagcaggggccgtcgaagagcgccctgtcggggacggcgcccaggaattccatccccaaaccctgctcctctctcagagctcgccatctcagataatggcactgccattcttctgggtgctcctgcgccacaccccagcgacgcagttaatctccaccccgccaaccccctaacgctcactggacaaccaatctgtcagcaagtcctgtgagctccatattcaaaatctacccagattggccgggagtggtggcgcaggcctgtaatccgagctactcaagaggctgaggcaggagaatcgcttgaacccggaaggcggaggttgcagtgagctgagaccacactactgcactccagcccgggcgcagagcaagactttgtctcaaaaaaaaaaaaaaaaatccacccagttacagaatctgcctctgatcctatccaccgcagcagcctcctgcctgggctccctcctgcccccacagcctgttcctcacaccaggccgaggaatctgggaacatctgggtcagatcaggtccctccccatctcagagcactactgtggcttcctctcactcagggtaaacgccagagtcctccccatgcctcaggaggccctgtgccatctgttcctctcacctctcagccctcacctcttctccctctccctcgggctcactctgccccagccccagctgcctcctcctcccgggtcctcaccctcccacctcagggcctttgcattggctgttccctctgccttccctttccccagaaagcccactggggcccaggtggcctgggttcagatcccagatctctccttctcggccactgactccaatctccccgtgcctcagtttccccatcagtaagatgggataatgtagtcgagacctcacagggttgttgtgaggattaaatgagttgatctatggggaaacattctgtggacatcactgttagttagtacttagctgactccattgcctgaccctggtctcagctccaatgttacctgcccagaaaggccttccctgatcaccctcttcacgagcctcacagtcactgtcattgaatgaacttgtttctttgcctctctgaagatacttcctagttcatctgctcactgtctgtgtccctcccctgccgctaagagagaagttctgcgggagtggggacctgatctgtctcaatcactgctgagtccccagcaccaaggacagggcctggtacgcagcaggtgctcaggaaatactgcagaagtgaaagggagaataaatgaactctctgattcctattttgcgccaggcatggggttgggggggtgcttactgggcagtggggacacagaactggccaagacaaacacctagtggcctctatgtctgccctgtacttactccccctccctctgggcctgggcctggatgcctcttcctccctcctacctgtcctttctgcctctgggacatgtctctaggagcctcactcacaagggcaggaatagatttatgctggtcttcactgtgtcttcaatatcattagcatgcacagggggcaggcaggggttcaaggaatgcttgtggaatgaatgagtgaacgattaagcagacggacacctggctaaagagcctggactttatctagagggcaatgggagtcatgggagggctataggcaaaggaagagacgtcacgtctctgtgttgggattctgcagacaagaattcccgtcctgccaagcctttgagcatgctgttctctgggcctgcaactcacttcctcctctttctcttggcaacttccagcccctcttatgggtttcaaattggacatctttctctagaaaaccctccctgaccacccctgctccccaggctgggccaggaacctcctctggtttcccatagccccactgacttcctccatcctggccccaacccctctgcctgtgtcccccgcaatcccagccctgactcatctgcctgtctctctcccatcctggccccaacccatccgagtgggcctccccatcctgcctggacccctccagactgtcaatgtctagtgaaacgtctctccaaccttaggctcattgtggacagagctggctgtcttggccatcactaggcccctggcattgcccagcaccaggctgaaccataataacttctcagatattaagcagatgctagggatctcctgcccctcactgtatgctcccagcccccacccagggcatcactcacggcagttggctggtgatctccagtccccaaccgagatgccaagctccagacaggcctgggcataggcgctgaggccacggcacaggctgagccgctccccaccgaccacacacaggtcatatacacactgctccaggaagggcctggggtccagggtgtcatggcagacagcgaaggggccatcgagcttggtcagcatgccacagagtcggtcgccctcatagtgttgggcctggcctggggtgcaggcgggacagttgttctggcagccatcctcacacaggtagtccccatcatccagcttccagctacttgcgaactccacagcgtcaggagccagagccccgtcaggcgtgaggaagtcgtctgctgggtcaccattatagttgccacacagcccgcacacctggtcttggaagcgtgcaggcaggctgagtgccagctggcagtcccagtcataagtgaccaccagcccaaagaccagctccaccacggcccgtggtccgctctggtacacacgcaggcgaccctcactcagggagactggcaggcgcgagcgctggttgtcaacctgcagagtgggtgaagaggaggtggtcaggcccctgtgccatctggcctccagccctcattaaagtactttttaattaaaagttttaaataggagaatatagaaaaagagtatgtgctcaaacgtcactgactcaagccttccctgactgccctattttatgattttattttatggtttgtttgttttgttttgttttatagagatgaggtcttgctatgttgcccaggctgatctcaactcctggcctcaagcaatcctcctgcctcagcctcccaaagtgctagaattacaggcatgacccatgggacccagcctacacccctttttaaatggcagccttgggccgggcgcagtgactcacacctgtaatcccagcactttggaaggctgaggcgggtggatcactttatgtcaggagtttgagaccagcctggtcaacatggtgaaaccctgtctctactaaaaataaaaaaattagctgggtgtggtggggcacgcctgtaatcccagctactcagttggctggggcaggagaattgctttaacccaggaggtggaggctgcagtgagccaagatcgtgccaaacagagtgagactctgtctaaaaaaaaaaaaaaggcagcctctccctattccatagcctccttccctgctttccttttttttctatagcatctggccttctgaaatataattcacaaattgaccatgtttatcatctgtcttactccatcagaatggcagctccacaaagacaagggtttgggtctgctttgatcactgctttatccccagtgcatagaacagggcctggtagaatcccaggcactcactaagtgaattaagtcactgctgcatttaataaacattcactgggcactcactctgtgcctggccttgagctgggagatcctgggaatacgaaggtggcggagacagccccaagccctaccctcatggggctcccagtccattgggagaaacagacacatcaccagacagtgagagctcagaggggtcagggcagagatgggagaagcacaggcagaaaagtcaaggccaggatcagaaaggcccaggcagaggggtcaaggatgggataggggaggtacaggctgagggttcagagctgggatagtggggagataggaggctgtgaaaacctagaaaaatggccagatctaaccttgctggtcagggatgttgaaatcttaacacccaacatgatggtattaagagtggggggaggcctttgggaggtgattaggtcatgagggtggcaccctcatgaatgggattagtgcccttatgacagaggcctcagagagctctcagatccgctttccaccgtgtgaggatacaaggagaagtaggccatctgcaacctggaagagcaccctcacctgaacctggcagtgctggtgacctcatcttggacttccagcctccagaacacagagacgaggttgtgttgtttataagcctcccaggctctggagaagcctgaagtctgactaagaaccaggagataagaactatgtctctctgtgccctggggcatcttttttttgagatggaatcttgctctgtcaccaaggctgggctgcattggcacgatctcggttcactgcaacctctgtctcccaggttcaagtgattctcccacctgggattacaggtgcctgctaccacgtccagctaatttttgtatttttagtagagatagggtttcaccatgttggccagactggtcttgaactcctgacctcaagtgatctgcccacccctgctcagcctcccaaagtgctgggattacaggcatgagccaccgtacccagccttttttttttttaattaataaaaaaattttttaaattagatatgggggtctcactatgttgtccaggctggtctggagctcatggctcaagcaatcctcccacctcggcctcccaaagtgctgggattataggtgtgagccaccgcacccagcctgggcatctctttcttactctttccttacacattctctgagctgtgccagagctgagacttgaagtggagaagtcttagccaagaggatggaatatgataaaaggagcaacaggagagaggacagcatgagcaatggcccagaaggaagacagagcattcactcattccggctcccagcaaagcttctgtgagtcccactgtgtggcctgctctgtgccagctggtgctttagacactgcagtgatggagacaggccatggccccatgctcagagctctcagtccagcatggctgctcaaatctgtttctcccctaagtccagtgatctccattttaatttttctatttttttatttatgtatttttttgagacagttttgctctgtcacccagcctggagtgtagtggcagcatcatagctcactgcagcctcgacctcctgggctcaagccatcttcctgcctcagcctcccaagtagctgggaccataggcaggcgccaccacacccagctattttttttttttttttttggtagagatagggtctccctatgttgcccaggctggtctcaaatttctgggctcaagtaatcttccagcttcagcctcccaaagtactgggatcacaggcgtaagctaccatgcccagccaatctccatttttaaatgacacaaataatattcgttcattacagaaaactgaaaatgcacaggagcaaaaatgagaaaagaaaatcaccctgtaggcagacacatacaaatgtatagatcctgttgagttttttcctacctttagatatatttacacttaaaaaaaaaaagaccatgctgaagtcactatttcattaactcctctcctaacaatgtcttgtgagtatcctactatgattctgacagtagctctgcacctttgtcaagtcactgacctctgtgaggatctgacggaaaaaaaaatgaaaggccgggtgcggtggctcatgcctgtaatcccaacactttgggaagccgagttgggcggatcacaaggtcaggagatcaagaccatcctggctaacacaatgaaaccccagctctactaaaaatacaaaaaattagccgggcgtggtggcatgtgcctgtagtcccagctactcgggaagctgaggcaggagaatcgtttgaacccaggaggcggaggttgcagtgagccgagatcacgtcactgtactccagcctgggcaacagagcgagactccgtctcaaaaaaaataaaaagtagttttcagagagaggtataaaattctgtatataatttcaagggatctgaagtccgcctgaacttgtgctcaacccctccagggctgaagaacacctcctttcaccaactgattattaatcgcagagatctacctgcacactcacaaaatcagggaggtacaagaatatttatttcaggtcagatacaggggcttacgcctctaatcccagaactttgggaggccaaggtgggaggatcacttgagaccaggagttcgagactagcctgggcaacatagcaagaccttatctctactaaaaataaaaatacttagcccagtatagtggcatgagactgtagtcccagctacttggaaggccaaggctggaggattgcttgagcccaggagtttgaggttgaagtgagctataatcacaccactgcacttcagcctgggcaacagggcaagaccttgtctcaaaaaaaaaaaaatcaaaaaaatattcattgcagtattgtttgtaatagtgaacaatgtgtccatccacaggggactggttgaatgaaccatggtgttcatatccatataaagaattgtgcagatgttaaaaaaaaatagaggctgatagagaaactgttgatagagaaactgtttcagaatgtattgctaaatgcaaaaagcaaagtagagaacacaacatatatatacacatatacatgtatatatgtgtgtgtatatatgtatatatatatatatacacatatatactctctctctctatatatatatatattttatttatttatttttttttttgagacagagtcttactctgtcacccaggctggagtgcagtggtgcaatcttggctcactacaacctctgcctcctaggttcaagcgattctcctgcctcagcctcccgtgtagctggaattacaggcatgcgccaccacgcccagctaatttttgtactcttactaaagatggggtttcaccatgttgaccaggctggtctctaactcctgacctcaagtgatccacccacctaggcctcccaaagtgctgggattataggcatgagccactgcgcctggccctgaagttattgaacaggcaaaactaatctatgctggaaaaaaaaaatcagaattgtgatcatctccaggagtaggttggggactgtttggtaaggcacatgagggaattttcccaggtgataaaaatattctgtatcttaatgggcaatttggttacacatttgccaaaggtgaactatacagttaagatttgtgatttttgttatatataaatttcacctccaaaatcagccaaaagaagtgtgaaaatattatattctagttaatgacatggtgaagtcttttgggtgatatgtactcatgtctggaactttgaagtgcataaaaaataagagagattgtggaatggacagagggatgaaccgatggatcagtgtgtgatcaatcaagaagagtacagtgtttagaatctagatgattggcacctgtaatctcagcactttgggaggctgaggcaggccgatcagttgaggccaggagttccagaccagcctggccaacatggtgaaacccctctctacaaaaatacaaaaattagctgggcatggcggcacatgcctgtcatcccagctactcgggaggctgaggcaggagaatcgcttgaacctgatcctgccgctgcactccatcctgggtgacacagcaagactctatctcaaaaaaaaaaaaaaaaaagaaagaaagaaagaaagaaaactctaggcgattggcatatgagcattcactgtataagaatttcaactttggacattttaatattttcataataacatggcgagaaaaaggaagtaattgctctaggctgctgttattcatatgaactgaatagaaatgcatttaccagagtcaggacagctgagggattaagaacaaggactccagagccagcatgcctgtgcccttagctccacctcttactagctctgagccctggggaagtcactagcctatctcaacctcagtttcccaatctgaacatgttcataataataatgcctcctgcactgagtttgtgagcattaaattcgttaagatgagaaaagtgctaagaaacatatctggtgcatagcaggtgctcattaaatttagttatttggtcaacgtaaatcccccattgctggataattttttgtttgtttgtttttgttttatgctattataaaccatgttggcatgttaccccccagtctctgtctctgaatatcctttaaatttctagacgtgggatggctggagggcagggttctaaggtcctgctactgattttcaaatccgcctccccaccctccaactccatggcccacttccctgcaccctggtttgaggtcggccattgggctttgcctccgccttcggacccgcagctcatggatgttaaccccccaaagcccccaggtactcaccaggacgaagccaacttcaccgcgggtcagcgacacagagtggctgtaggcgcgcacagtgacgaggcccacgtaggagacgcggcggctgccccggtgctcgttcttggcctccacgctgaaggcgggcagggtgtcgtcctcgctgcacagctccaccatcgtgtacgaacaggtgcccatcatgtcgtagcgacggccgtcgaaggtggtgtaatgggggtcgccctgggcgcggcagacagcggtggactccgccacacacccggccttcccgcctaccacctggcagcgctgcccggctgcgcactgcatgccttcgcaggagggctccactggggacagtacagctggggagggaagggaacggtgaaaagagagaatcagaagtgtccgcggggttgtaatcccagcacattgggaggccaaggtgaggggggcggatcacttgaggtcaggagttcgagaccagcctgcccaacatagtgaaaccccatctccattaaaaacacaaaaattagcagagcatggtggcacatgcctgtaatcccagctacttgggaggctgaggcaggagagtctcttgaccccaggaggcgaaggttgcagtgagctgagatggcaccactgcactccagcctgggtgacaaagtgagactctgtctcacaaagaaaaaaagaagaaagaagaggaagaagaagaagaaagaagaaagaagaagaagaagaagaagaagaagaagaagaagaagaagagggaagggggaggaggaggaagaggaggaggaggaggagggaagaagaaggaagaaggaagaaaccgcctcaggcctcagagggaggcatcctggagcccaccttgccggggaagcttgagcaattcgctcacaactgcccatttttgcccatttttgcccattttaaaggtggggaaaccgaggtctggaaccccacagggagagagttgctcaggcctctctgagagccccatgttttctgattctccagtttaacacagggcagcctagaagaagggaaggcagtaaataagaaaaggcagaaacggtcattaaaatgttaatttgtgtttttctctcccccttttcccctcttccctaccttccctccagggtcaaaaagagctaagggatttttttaaggacagaaaatggaagacagccttcagcaggatgaaaaggactatggagtcaggccgcctaggtaggaatcctggctcaaccaactggctctgagacactgggcaagtggttttaaactccctctgcctcagtttcctcatttgtaacatgggggtgataataatacctccttcgtagggatcttggtggggggtgttaggattaaataagctaaaactcgagaaagctttagaactgaacctacgtgttaagtggagtgttacccattataattaatcacccaccgctccctcattctatttctcaagcccaaagtggctccttgaagttgggtggcttccatgccttggaggggaggggaggggcatttttgccaggtccaggaatgccagagtcttagcgtggcagggactacatgggaagaaacagctttcctccatctgcctcccagtcctcaaaagtttttgcagctgggtgtggtggctcaggcctgtaattccagccctttgagaggctgaggcaggaggatcgcttgagcccaggaatttgagaccagcctgggcaacatggaaagaccctatctctacaaaatataaattaaaaattagctgggtgtggtggtgcatgcctatagtctcagctacttgggaggctgagggaggattgctttagtccaagagttcgaggctacggtgagctgtgatcacaccaccgcactccagcccgagtgacagagtgacaccctgtctctaaaacaaagttttgagggagaaacagttatccccattttacagatgtggaaactgaagcccagagagatgaagtcacttgtccaagatcacacagcagagctgggatttgaaccctgggaccctgcactacactgacagcgtctcatgggctgagcctgaggtcacacaaactgccaggtcatatacattaactgtgtcaaaaacacgtgaaacacctagaaagattgcaagatactcccctccccaacgcgtagtcatcttattatcatacatttagatctcctaagtttgggtatcaacattcctacatgaggtgtggagagtggcttagcaactggtgtggctatgtcagttgctaaaatatcaaaatatttccaaactggttggtgagaagctgctgacctgactgtcccccacaaccccaaagatccctccttctcagcaccctggctctcccctagggccctttccagaacaaaccaacagacaggggctgatgccagcatgatgggggcttcaggaccctgtcacagtgctttggctgctgtctcttctgactggtagtgccccagctctccctggttgctaaatatttagaatattgtttctgggcggatgggaggggctgagaagacttgaggaaggatgtcgcggagaagagaagtgaggggaggacaatcaggatcccgaaagccacagaggagtaggtgggtggaaaagcggtcaccaggtggacaggaccaggggacatttccattacttactccggccgcaatcagcagctgttgcgtagcctatagccttggccagcccgaaggtgagcagtcccaagttggtggtggcctcggccgtgtggatcatgtcagctgtgccgagctccacttcagcatacgagaactcactgcctggcacagcctcccaggtgagcttggcccccactgcatgcccatctatggtcagcccgctgatagccttcgtctgtgccactaccagggccacgccctcacagcctggtacactcttgaccacataggctgggcagtaggccgccacatctgggatcaggaccaggtaggggtcataagtcacttcattccttatggcacctgtgccaaacaacaggacctggatgcccacatttgcagacaggtagagtggccaggatggccggacctcaaactctaccacatcacctgcctggagcccacgggagccagtgatacccccatggttgtaggtcagctttgtggcctggctggccacaacgaaggccaaatcatagcgagattgggaggccagcgtgggtactacatagtgggtgccccaggcagacgtgggtagcagctgctcaaccacatggttgcaggtcgtatgtttctgcgcacagctgtggccagagaggacagccacggggctactagctgtgacctttgaccccgagagatccactgagctctgtagctgggccacattgtagggctgtagagtcactcttaggacatcgcctgctggatagaacttgccattgaatgtcactgaccccttcagcgtgacactgaccgaggcacctgcggcaccggccaccacggcaaactccttgacattcctggctgaggtgccggggggtgtgagcacaaaatactcggtgcctagggcctggatgggccgcagcagtgtcagctccgctgtgtcaggcttggcatttagtgcctgcacagagatggcatagtcagaatggatcaccaccgcatgctggaagatcttgctgcctatcatctcagccttggcactgatgttgaccatgaccgactccccgggcctcactgtgaccttctttgaggtgttgtctgcctggctgaggatggagactgaagcggggctctctgacagactggagataaggaggcgggggtaggccttgctgtaggccagctgatagttctgcaggaaggctgtgaggaattcctctctgccagtgttcttgaggtccactgaagcctcctgggtcaatcctggttgagaaaatacagttgtgggtccacttatccaatcctccccacttttgctctgcacccagaaacatgttgaagtattaacttgggctttcccccaccacccttctctttcctttcttctgattcatgcagctttcgtctacaagccttcctggcttttgtttttcaaaaatctaaacaccttagacagggccctcaaactccaatgctgatggggccaggcaagaaatataaatgtgtgaaacagtcccggaggggcgactgtggaactgaagcactcctataccatctaaagtgggttgttgcttatgcaaatccatcagtgtgatacatcttatcaacagaataaaggacaaaaactatgtgatcacttcaattgatgccagaaaagcatttgataaaatttaacatcctttcgtgataaaaactctcaagaaagtagacacggaaggaacacaccccaacatgatgaaatccatgtacaacagacccacagctggtatcatactgaatggggaaaaactgaaagcctttgctctaagatctggaacacagcaaggatgtccactttcaccactattcttcaacatattattgttagtcctagctaaaccacttagacaatagaaaaaaataaagggcatccaaactggaaaaagggcattcaaattatctttgtttgcagatgatataatcttatatttagaaaaacctgaagacagctgggcttggtagctcacgcctataatcccagcactttaggaggccgaggtgggtggatcacctgaggtcaggagttcaagaccagcctggccaacatggcgaaacccaatctctactaaaaaaaaaccaaacattagctgggtatagttgcacatgcctgtagtcccagctactcgggaggctggggcaagagaatctcttgaacccaggaggtggaggttgcagtgagccaagatcacaccaccacactccagcctggatgacagagcaagactctgtctcaaaaaaaaaaacaactttggctgggtgcagtggctcaagcctgtaatcccaccactttgggaggctgagctgcacagatgaagaggtcaagagattgagaccatcctgaccaacgtggtaaaacctgtctctattaaaaatacaaaaaaataattagcctggcatggtggcagacacctgtaatcccagctactcgggaggttgaggcaggagaatcgcttgaacctgggaggcagagatggtagtgagctgagatggcaccgagctgagatggcaccattgcactccagcctgggcaacgagagcaaaactccatctcaaaaaacaaaaaacaaaaaacaaaacaaaaaaaacagaaaacctaaagacttcatcaagaagctattagaactgataaacaaattcactaaacttgcaggatacaaaatcaacatacaaaaatcagtagcatttctatatgcttacagcaaacaatctgaaaaaaaaaaaggaaagtaatcccatttacaatagccacaaataaaataaaacacctaggaataaacgaaagaaatgaaagatctctacaatgaaaactataaaacagtaatgaaagaaatggaggaggacacacaccaaaaaaaatggaaagatattccatgttcatggattggaagacacaatattgttaaaatgtccatactaaccaaagcaatctaccgattcaatgcaatctctataaaaataccagtgacattcttcacagaaatagaagactaatcccaaaatttgtgtggaaacacaaaatacccagaatagctaacgccatcctgagcataaagaacaaaactggaggaatcacattacctgacttcacattatactacaaaactataataaccaaaacagtgtggtactggcataaaaacaaacacatggaccagtggaacagaacatagaacccagaaacaaatccacccacctacagtgaattcatttttgacaaagatcccaagaacatacattgcatttattgaagataaatggtactgggaaaactggatatccatatgcaaagagtgaaactagacccctatctctcaccacatacaaaaatcaaatcagaatggattaaagacttaaatctaagacctcagactacgaaactactacaagaagacatttgggaaactctccagttcattagtctgggcaaaaatttattaagtaatacatcaaaagcacaggcaaccaaagaaaaatggacaaatgggatcacatcaacctaaaaagcttctgctcagcaaaggaaacaatccacaaagtgaagacacaactgacagaataagagaaaatatatacaacccatcttagctaaagcaattagacaagagaaagaaataaaggcatccaaactggaaaaaaaaaaaaaagaagtcaaattatccttgtttgcagatgatataatctgatatttaaaaaaaacctaaagacgccatcaaaaagctattagaactgataaacaaattcactaaatttgcaggatacaaaatcaacatacaaaaatcagtagcatttctagatggtactgacaagggattaataaccagaatataaaaggagctcaaacaactcaataggaaaaaaatcaaataatctgatttgtgtgtgtgtgtgtgtgtgtgtgtgtgtgtatgtgtgtgtgtttgagatggggtcttactctgtcaccccaggccggactgcagtggcacgatctcagctaactgcaacctccgcctcctgggttcaagtgattctcttgcctcagccttccaagtagctgggattacaggcatgcgccaccatgctcggctaatttttgtacttttagtagagacagggtttccccatgctggccaggttggtctcgaactcctgacctcaagtgatccgcctgcctcggcctcccaaagtgctgggattagagacgtgagccaccacgcccggattaatctgattttaaaatgggcaaaagatctgaatagacatttctcaaagaagacatacacatggccagcaggtatatcaaaaaatgctcaacatcactaatcatcagagaaacacaaattaaaaccacagtgagatatcatctcactcgagttaaaatggcttttatcctaatgaaaggcagtaatgaatgctgctgagcatgtggagaaaagggaaccctgttaccctgttggtgggaatgtaaatcagtacaatcactatcgataataatatgaaggtttctcagaaaactaaaactagaactactgtatgatccagcaattcctttccttccaagtcaggaagtcagtatatgtaagagacatctgctctcccatgtttattgcagcactattcctaatagccaagatacggaatcaacctaagtgtccatcaacagatgagtggataaaggaaatttggtacatacaaacaatggagaattatccaccataaaaaagaatgagatcacccggcacagtggctcacacctataatcccagcactttgggaggccaaggcaggtggatcacttgaggtcaggagttcaagacgagcctggccaacatggtgaaaccctgtctctaccaaaactacaaaaattagccaggaatggtggcatgtacctgtaatcccagctactcgggaggctgaggcacgagaatcacttgaacctgggaggcggaggttgcagtgagccaagatcgcgccactgtactccagcctgggcaacagagtgagactcggtctcaaaaaaaaaaaaaaaaaaggaatgagatcctgtcatttgcaacaacatggatggaactggaggacatgatgttaagtgaaataagccagtatagaaagacaaatttcacatgttctcactcatagatgggaatttaaaatttttaactgatgaactcatagaaatagagagtaaaatgatggttacgatgattaccacaggctggaaagtgtagcggggactgggggataagtagatatggttaatgggtacaaaaatacagttaaacagttagataaaatagataaaatctagtatttggtagcagaacaggatgactattgttgacgataatttatggtatattttaaaataactgagagtggaattggaatgttcctaacacaaagaaatgacaaatgcttgaagtgagggatgccctagttaccctgattttatcattacacactgtatgcctgtatcaaaatatcacaggtaccccataaatgcaaacccataaaaattaaaaattttaaaaatatataaactagtaaaaaaaaaaaaagtggattgttggtactagctttcacctgttataatgaaagaatgtgagcttttttaaattgtaagaccttcctgtttttctttttttttttcttctgagatggagtctcgctctgtcacccaggctggagtgcagtggcacgatctcggctcaccacaacctctgcctctcaggttcgagtgattctaccacctcagcctcccgagtactgggactacaggtgtgcgccaccaggcacagttaacttttgtattttttcttttttttcttttgaaatggagtctcactctgttacccaggctggagtgcagtggcgcgatcctgggtcactgcaacctctgcctcccggtttccacgcccagctaatttctgtatttttagtagagatggggtttcaccctgttggccaggctggtctcaaattcctgacctcaggtgatccacctgcctcggtctcccaaagtgctgggattacaggcgtaagccaccacgcctggccgttctttctgtttttaaagagaatgtggctatctgaattttcatgtgaaatctccaacccacaattgttttaagcactttggggctcaaggtggatgtactctgctgccagtgtatgatttccatctttttacaaactggagtgcagtggcttaaacacaacacactgcagcctcaacctcctgggctcaagggatcctcctgtctcagcttctggtatagctgggaccacaggcacgcactgtgtgcctggctcattttttaatttttttctagaggcagggtctcactttgttgcccaagctggtcttgaactcctgggctcaagtgatcctcctgcatcagcctcccgaagtgctgggattacagacgtgaccaactgtacccagctggtttttgtcttaataggacttgtgggggccaggcgcggtggctcttgcctgtaatcccagcactttgggaagccaacgcgggtggatcacttgaggtcgggagttcatgagcagactgaccaacgtggtgaaattccatctctactaaaaatgcaaaattagccggacatggtggcatggggcgcctgtaatcccagctactagggaggctgaggcaggagaatcgcttgaacccaggaggtggaggttgcaattagctgagatcacaccattgcactccagtctaggcaacaagagtgaaactccatctcaaataataataataataataataataataataataataatgggacttgggggtttgtgaaaaggggataaagagaagaaggggattatggaagggtgaatgaattgtctcctagaaatagatggcagtgggggcttctgaccacccccaactaggaagagcgtccctggggctgaggagagagaggtctaaggaatcttgaagagagtgtgggggctatggaatgaccaccttccatataaagggggctttgaaggatatcccagggggccaggggatcaggaacaatggacatttcaaaagtaacctagatggatgctgactggtgacgagagggtcctcatatcccatcctccccccagtactttggctttatccaaaattttagttctggacacatccctgggagaagtggggacaacaccctccaagaatgactttcgtgaaattttccatcaacttagcagaatgaggctcagagtcaaaaccttagttgagttgcagaaaaccaagaaagttcttgcacacttgagtttggggactaaggtttttgcctgtgctcccatccagaaaagggtgagaattggtgaattctaccacatccccctgcagagcctaagggcctctctcctgtctcagctagcctggggtgacatgtggaggaggcacacatggaaggcgtggacccacgcagagttccccagattggaacaaggacatggagagggtcttggtctgacttaccccacaggagggttgctccagcccagagtatccaccagctccatagggcacccatggctgcagtaggaaaagagaaaggatcatagaaggctgatccaccgcctctgctggagactgtcctgggcagaagggcccactctcatgacaagggccacctgggaccatgaaggctgaggtggggaaagaagtcgggcagattgggccagggggtatggatccaaggaccagtgtgtgtgtataggggaggctggctgtccagcgggtctggaggtgggttggggagggcagaagccagggacggggtggagagttggctgtcttgtgggtctaggggtaggatgaggaggcctacagtcaggggcaagagtaggggacctgctgtcccacttccaaaggggaccccagcccttctcacctgcaggtccctggagctgcagggccagccctgtggcagggctatatagtggagtttctgggccacaccctgggccacgtgccaggcagatgatgccaacttcctggaggaggctgccatcctcatggccagatgaaatgggaaactgtgaaggcctgggaaggagggacagtgattctggatgcctgggttccaagaagggagtgaggacagctggtggccattccctggaagccttctggagagtttggtcctggaagggtggggtccctgagggagacagctggggagcaggcagatgagcacctgggtccctgggtggaggtggggtagggtgggggtgtgggcagtgagggtgggaggtggcatgtggtcatatttgctggcttagtggctaggttccttcctttggctcctgccaggaacaacagtgagggacccatatccgggtcctggttccttctcagtccccacaggctggggagtccctagccacccacatcctgcttccagacaccactaggggcaggtgtctgggatgggcaggagtctgaggctatggagtgggacacaagacctccaccgcagcccagtggggcgtctgcggtttctcatctgcaaaatgggaacaccaaaaccagcctctctgggcatctttacgtcccagagatgtaaaaaaattctcaaggactgtagagctggggggcagcctcctctggtgtgggcgcaggccaggctgcaggtgggcactgggactgaggcggtgtgtgaagaagggacaatggcctctgtttcctggttccacacagacacccagattctacttctgatcccagacacctgctcctcagtggtgctggaaacaggatataggtggccagggactccccagcctgtgaggactgaggaagagccaggacctgttggttttggagtttttttgtgtgtagggagggtttgctcttagcaggggctagctgaacaggtttaggggactctgtgcctctccatcaccccagaatttgcctgagatgggaggtggaggtctaggttgcacacaaggagcagaagaatgagctgaaagttgggctttctcagctggagtcagctcctctgaggggctggcctgacccatgccctgcctgccttctccctgactcaggatctcattgtttgctgggggagtctcccctgggaccagcagctgcaaagcctgggtgctctcttggaccaacaccctagcagctgctgcccctggggctcctcctctcttatcacagcagcctgggcctctgggaggccagagcgggtggggggcttctctctccctggagctccaaccaatccccacgcccacccaagaaacgttcctggagggaaagataaaggctaagagttgactgggacataaagtcaaccaggagaatgaggtgagtaaataggagactggctaaaagccagagataacaagaaacaagcaggggcaggggacccacaggaagtggaagctttgggaaaaggatgcctgggtccctgaggggtctaaaagttggtggaaggggctgctgggtccctgagacagagaaggactcggaggaggagacgtcgggattcctaggaggaaacagcaattgcaaaccaagatgtgaaaattctctgtctgaggccaggcgcagtggctcagcttataattccagcattttgggaggctgaggcaggaggattgcttaaggccatgagtttgagaccagcctggttcaagaccaacatagtgagaccctgtatctacaaaaaaatacaaaaattagccaggcacggtggtgcacgcttgtagtcccagctacttgggaggctgaggcaggaggatcacttgaggccacaaggtcaagaccagcctgggcaacatagtgagaccctttctctacaaaaaatataaaaataaaccgagtgtggtggcatgcacctgtagtctccaccattcaggaggctaaggtgggaggattgcttgatcctaggagtctgaggctgcagcgagccgtgatcatgccactgcattctggcctggggagaaaaagaaaaaagaaaataaaatcctctgtgtgccatatgcctcttgtaattagaggcactcagagacaaatgggaggtgaagggaaagaatcagggtgagtttcatgggtgtttctggccctcaattctctctaagccttggggtttcccctggttgatcacagaaagaagcttcctgccttcaaaattcatcatcgctctccacagccagagtccccagaaatggggtggttgtggtgggagatctcacaaattaatactctgtatgtgccaatccccttgggtcttctttctcactccttttaaggcccaagtggtgtgtgtgtgggtgtgtgtgtgggtgtgtgtgtgtgtgtgtgtgtatgtgtgtgtgtacacccctgtgctttaccctgtattatatcaattctcaggaaaccctttggtgacccgggaaataaactctggggacacttccttatggtcagagaaatcgcatccatccctccactggcagccttgctctgagcccaaacaagggtatttgtgtacctgagcctttcggcctcttcctgcttatctgcttccgtctccttgcagcatgggcactggctataccatcccagacccctgggcccctctgactagtcttggctttatagactggagcacagtggaagagaatttactctctccagctaaattcaggcttgcgggcaatttctaacttaattcctttacgctctggatcccacaatccgacttccataagcactgaacgttttgttaaactctccaatgacccattatttgccacttgcctctagttccttccctctaacatttgacattcacacttcctctctgcctataataattgaaattctataggagatgttctctgaccataatggaatcagcttgaaatgaataacagaaaaacaggaaaatctccactcacaaggatattgagcaactcacttctaaataatccatgggccaaagaggaagtatcaaaaatacatagaattaaatgaaaatgaaaagaagatatttcaaaatatgtgggatatagctaaagggaaatttatggcattaaatatttacattaggaaagaggaaagttcttaaaccaatattctaagctcttcttacacaataaagtagtaaaagaccaaaacaaacacaacgcagaagaaaggaaataatgaagagcagaaattaataaaactgaacatgagaaaatcaatgaaacgaaagaactacttctttgttgttgttgttgttgctaacaagagcaagtctttgaatttcccaaatgtatttgtggatttgtctattgttgaatagagcattctataaatatcaattagatcctgttgattgatgctgttattcagttctttgatattctcacatattttatcctggtagttctatcaatttggtgagactgacgtttttaattctccaactatatttgtggacttgtctatttcacctttcagctctatcagtttttgcttcatgtacttgaatctctgttgtttggtacatataccttaggattgcaatgtcttggcagaatgatcctttgtttttagcaatgtttttcgctctgaaggaaagtattttcgtattaatatagtacttccttccttttaaaaatttatatttaaaattatatatatatttatttatttatttatctatttattttttagacagagtctcgctctgttgcccaagctggagtgcaagggcatgatctcggctcactgcagcctctgcctcccaggttcacgcaattctcctgcttcagcctcccaagtagctgggattacaggcacctgtgaccacgcctggctaatttttgtatttttggtagatacggggtttcaccatgttgaccaggctggtcttgaactcctgacctcaagtgatctatctgccttggcctcccaaagtgctgggattacaggggtgagccactgcacccagcctaaaatttatatttataataacataaattaataaaattaatatatatttctattcttttattttcaacctacctatgttgttatatttggagtaaagttttttggagacagtatctagttggatcattttttaaatccactctaccaatctctggccttttatttcatgtaaggagatagactatttacatttaaagtagttattgatatgtttggacttaagattaacattttaatattcattttccatttgttccatttctcattcttattttttcttgcattcctgtgagttacatgagcattttttagcattccattttgattcatattattttcgaatacataatttgtagaattttcttagcacttgctctagtactacaatatacatatgtaactgattataatccaacttatgaatattttaccactttgattgaagtgttgaaactttacatccatatagatccttttaccctcccacttatacatatgcgtgtgtgtgtatacacatataactattttaagtattgtctcttcctatagacatcagataatactataatttttgcttcaaccaactacgatttttaaaaactcatgagaagggtaatctgctatagttatcactatttttgtccattctgctgttcttccttcctttctaaagttctgagccttttcctgtaatcatttggactttggagaacttcctttaatcattctctaaaaataattctgctgacggcaaagtcttgtagtcttccttcatctaaaagctttttatttcttcttcataccccgtagatagttttgctgcatataagattctcggctgggcacagtggctcacgcctgtaatcccagcactttggggtgctgaggcgggcagatcacaaggtcaggagttccagaccagcctggccaacatggtgaaaccctgtctctaataaaagtacaaaaattagccgggcatggtggcgggcgcctgtagtcccagctacttgggaggctgaggcaggagaatcactgggaggtggaggttgcagtgagccaaaagcacaccactgcattccagcctggaggacagagcgagactgtctcaaaaaaaaaaaaaaaaagattctcagcagatagttattttctttcagcacttgaagagtattgctccaggctttcttctccatggtttttgataagaaattttttgtcatttgatcagtgttccctatagacaatttataattcctctctagctgcttccaagatagtttcattgtttgcctttgttttcataagttagttatactgtgttttggcatggaatccgtcagatttattctgtttagcttcttgcatctgtaggtttatgtcttttgccaaatttgggaaggtttggtcattattcttcaaatatttttcagccccactttcttttctccttctgttaatctgataatacaaatgttagctattttataattgtcctgcaggttctctgagcccttgttagtcattttctgtttctcttttttaaagttgattgtctctctgttttttggattgggtaatttttattgttctatcttcaagttcacttcttatttcctttgtcatagttgctctgctcttgagcctttccagtgagtttttattttagttattgtatttttcagttttatcattttcatttgattctttaagaacatactttccatttctttggtgagattttcttttctttcccatctttgcaaggaatttctacttgcttggtgaaacatttttatgatggctactttagatctttgtcagataattctaaaatctttcatctcagtgttagattgttgattggcttttctcattcaagttgtgatttttctggttgttcatattatgtatgatttttaaattatatcctggacatttctggtattatgagaggagaccctggatcctatttaactcttccattttagcagtcactgtttttaggttagcatgcaggtcctggcctacttttgtgtgctatgattccaatgacaatttagttttcagagcccttgcattattattccggtctatttcatttgcctggtgctggttgagctcatacccaattcctgttagtaccaccaatggaggttaaaagcattttcttggggcctgcttggtgctgctacgttaggagtaggagacactggcacaaaagggtggagagtacttccctgggctgcgtggtgccagcagggctcttccttcatctctgccatccactagggtggggaaagcacctacctgggtgctttctgccgctggatagggggctggggagatgctggatctagaccacgtcctgtcgttgggtgggaaattgagagatgctgggccactgagatgtttctcgagttctaaggcccttgtcagttttccttctttttatctttcagagtcctcttaagaatgtctgttatgttattccagggtttttagcagagaggagccaggaaaaataaatctatgtcatcttgacagagatgttaccatcatcctggcttgttgtagtctcctaagatagaaatcaagtgagattaccagacacagtattaaagagaaaaaaaaaaaaaagtttgtttccgtttgtgcagaagggaggtcagcaccgtgaaaggaaaagggtaggctgctccccacagggagcaagtcgatctgtcttgtaggggtccagatgccatgatgtgcctgtcatcatgtgttaacaagggatttcttggcgcctgcacaatggttcaacatggtttttcatacattgcatgtaatattggcattttaaatctctacctctgagcatgatttttagcattgaaataaggaaattatcactgtaagttgaaacctaagctgttcctgtggcttcctggggaagtccctaagcccctaaagcaggaacttgtggttaatagcttcttgggcctctgatgctgactggctggaggttaggtatagaacaggaattaaaagaaataaagaatgtgtaagcaaaacttagttgtatgtaagaaaacccaattccccctgaggaagagaaagagctggagtcctttaaaattaactgcctgtttttctatggctagtgagccttatctctccctttcccaggcattgtgaagactctgtttctctagctgtgcagctgtaagatcactagacagataatctcaagtcgtaaaacatgctgttccttgaaaaaaaaatgatataatgcatgtctcaattgaatgactgtctttgtttctcacttctgtgatatgcttccccctgcacagatctcccccagccccacgaaatgcttaaaaggtagcttgactctttgttcagggctcagtcctttggatgttaatctgactgggtcggtgcacctgaataattaaataattcctcctcaaccccacggtctctctgattccttaattatcctgctgcagacaagctacagcttgagtaaggggcttttgttctttttcactaaaccacctcaaaataggaagccagccagctgtctcactcccagccaagagatttcattctccttattctttttttttttttttttttttttagaccaggagaaataactttatttgaataggacccgagacagcatattgggctaaggaggagaggtaaggttccaaaaccgcagtcaaagctcatcaaccaaatggactctacttcccagcaaccttgcagttagtgcaaccaacaaaaggcctgctggggaatgtatttgccactaaatcccccaagtatgccaacattacaaaaaagatagaggtttttcatcataattgaatttccacaaacctccccaatcacaagtattataagtggaagtaaaaaatcacattttacagatctcaaacttgtcttcaacatttagttcatcatcttcaaaaaatagctcccctgcctaattcattagctatatgatctctccaagcagcaacaagatggccaggccatggcaatcctcttcctatttcccctagccactcagggctcaacagcagggtgaggctcaggtggaggtagggggtggggagcacaagggctacattcccccagtacaacgtggcatctgaagcttgatgggagagcagaactggtgggacttgagggaagggtccagggcctgtattcagtcagaatcactgctggaagaggaggaggaagaggaggaatgcttgtcatgcttgtggtacttgtggtgcttttggtgcttgtgcatctttttatgagctttcttcattttcttctgcatcttcttgtccactatcactgctggtccaaccatgccaggagccaagggattcacaggagggattccaggggcaggcggtgggtatggaggagggtagggacccaacggttggcatcctggataccctggctgtggcacaggatgagggggcccacctggggggaaagctggattgccatggggagctcctgggggaggaggacaggggcctgggggaaagggtggattaataggtggtgggtgggcaggattggaacctccagggcacccaatattggggggatatggatttggccctggctgcccggcattgggattccacatgtttaggtgtgtcctccagcctttccaccgccgcctgggcttgctgcgttctccttcgcagtcctcattctccttattcttaaggagcaaaggtctcttctggaactacttcctgctaagcatggacatagtctctacatctatttccaggaggagtagaaatttcttatggcttgctgaaggggctgatacggctctgggctagtggtctctgaaacaggctggaagcctggcaagaccatttacttggcatgaaagcattacagtctgaaagacgtgaattttaccagcaggttaaacaagcatggtttaaaaattaaaaatttaaagattaaaaactttaaatattaaaagaagaaagatagccaataagggcttaagaaagggaggaaccaagttacaagccttacaagggtaaggttcatctgacagcattgtacactaagttgacttcctttatcaaaagagtgtaaccaatttcctgattgtaaattgcctgggtgttaacctctactcgcccagtagtatttatccaagtgcagcaggaggtatggtgactgtacaaacatcttcctgttcagctaataagtaacctagaagtcttgcacaatgattaacttgacatgaaactattgtagtctgaaagacacaaattttaccagcaggttaaagaagcatggtttaaagattaaaagaagaaagatagctaataagggcttaagaaaggaaggaaccaagttatggagggtaaggcccaagttatggagggtaaggcctagcagttgtccaacaccacattagcaagagaattgagggaggtttttagcctttccagggcctgcctcacctggtccactatatgcctagggctattgtgactccaggtaccctgcacccagactaaaaggaagaggttacagtgagatagaaggtacagtggctgggcgcggcggctcacgcctgtaatcccagcactttgggaggccgaggcgggtggatcacaaggtcaggagatcaagaccatcctggctaacacggtgaaacccccatctctaaaatacaaaaaattagccaggcatggtagcatgcacctgtagtcccagctacttaggaggctgaggcaggagaatcccttgaacccaggaggtggaggttgcagtgagccgagatcgtgccactgccctccaacctggacaacagagtgagactccgtttaaaaaaaaaaaaaaggaagagggtacagtgggagcatgattcatgccaggccctcaccatgtcttgagtatgacctgtgcacctaatagggaaatgatcccaaactatcttacccagctggggtaatattttattattatattgtctgctaaattttccccaagttgataatgtattttaaagcctgatttaagtcttcatctattagaaagtttgtcttgagaaaggactgctccaataggtcattttaaaagggctgagctttaagttcccctttggggtggatcttattcttagtaaggcaatagggaggcacttaatccatgatttctgggcttcttggcatagtgtagccaaggttctttttaagggtttgattcattctctcaactttcccagaagattgaggatgccaggcagagtgaagtttgtattggatgctaagactgctagacagccctttggtgacctaggtgataaaagacagcctgttgtcactttgtagggaggctggaagcccaaacctaggaattccttgtttaagcagccatttactttttgtttgtctggtttggtttggtttttaattttttttttgacagagtctcgttcttgttgcccaggttggaatgcagtggcacgatctcagttcactgcaacctccacctccagggtttaggtaattctcctgcctcagccttcttagtagctgggattacaggtgccctgtgccaccatgcccagctaatttttgtattttttttttttgagacggagtctcgttctgtcacccaggctggagtgcagtggtgcgatctcggctccctgcaagctccgcctcccgggttcacgccattctcctgcctcagcctcccgagtagttgggactacaggcgcctgccaccatgcccggctaattttttgtatttttagtagagatggggtttcaccgtgttaaccaggatggtctcgatctcctgattgtgatctgcccgtctcagcctcccaaagtgcagggattacaggtgtgagccaccgcacctggccttaatttttgtatttttagtagatggggtttcactatgttggtcaggctggtctcaaactcctggcctcaggtgatccgcccacctcagcctcccaaactgctgggattacaggcgtgagccactgcacccggcctttaagcagtcatttacaaacttcaattgctttttctgtttgtgtggggaaagcttccacccagcctgcgaaagtgtctataaaaatcagaatatatttgaattcccctttaggggtatctgtgtaattcgccaatcttctccaggataggtcttcttatgctgcactggggcagagccagtggatgggctcaggaattatttctaagacaaatttcacatgcttgagttacagagtccactgtggcttttttatttttattttttgagactgagtctcactctgtcacccaggctggagtgcagtggcatgatctttgctcaccgcggcctctgcctctcaggttcaagcaatgctcctgcttcagcctcctgagtagctgggattacaggcatgcgccaccacacccagctaatttttatatttttagtagagacgggatttcactaagttggccaggctggtctcgaactcctgacctcaggtaatccacccacctcagcctcccaaactgctgggcttacaggtgtgagccactgcacctggcccactgtggctttttctttctttcttttttttttttttgacaaggtctcgctttgtcacccaggctggagtgcaattgtgcaatcttgactcactgctgcctcaaactcctgggctcgagcaatcctcccacctcagcttcccaagtagttagtaccacagatgcattccaccatgcccagataatttttaaaaatgcttttgtagagacacagtcttatcgtgttgcccaggctggtcctgatctcctgggctcaagcaatcctcctgcctcagcctcctcaaatgctgggattactggtgtgaaccaccatgcctgttaggctgtagcttttaaagccttgctcactaggagattttggattaaattccatagtgagtctctctcataatgagtttcctcatgaagtcttttgatgactttccattggtcagcttctggtaggaaaaggcattgttgctgatcttctagccaccctgaccatttaaattataccctccttcatctgctcagtttttttttttttgatggagtctcgctctgttgcccaggctggagtgcaatggtgccatctcagctcatggcaatctctccctcctgggttcaagcgattctcctgcctcagcctcccaagtagctgggactacaggcatgcaccaccacgcccagctaatttttgtgtattttagtagagacagggtttcaccatgttggccaggctggtctcgaactcctgaccttaggtgatcctcccaccttggcctcccaaggtgctgggattacaggcatgagccatcactcctggccaaccactgccaacttctttttttttttttttttttttgagatggagtctcgctctgtcccctaggctggagtgctgtggtgcggtttcagctcactctaagctccacctcccgggttcacgccattctcctgcctcagcctcccaagtagctgggactacaggcgcctgccaccatgcccagctaattttttgtgttttcagtagagacggggtttcaccatgttagccaggatggtcttgatctcttgacctcgtgatccgcctgcctcggcctcccaaagtgctgggattacaggaatgagctaacgcgcccggcccagctgcccgtttggcagctctatcagcctggttgtttccttggctgattaaagaattgtctttttgatgccctttataggacataacagctatttgggcagggagcttaatatggtttggctctgtgtccccacccaaatctcatctcgaattgtaatcccctcatgtcaagggaagtacttggtgggaggtgactggatcacgggggcagtttccccaatgctgttttcacaatagtacgtgagttctcatgagatctgatagcttaaaagtgtgtggcttccttcactcactctcctgctgccatgcaagatgtgccttgcttccccttcaccttccgccatgattgtaagtttcctgaagcctcccagccatgcagaactgtgagtcaattaaactttctttgtttataaattacccagtctcaggtatgtgtttatagcagtgtaagaacagactaacatagagatgaactgcctcaaggaggaataaaatcgcttcattgggttttgtcggggtgctcctggcagttagcattctcctctttccagacagctgcatgagtatggagcattaggaatccatacttagaatcagtatatatattaagtctcttcccttcttcaagctgaagagcccttaactaaggcttggagctctgcttcctgagctgaagtgcttaggggaagttattttgcctctctggtccagcgtaggctgacaatagcatgttttgccttccgggctccattttatttgtttgtttgtttgtttttttagatggagtctcgctctgtcacccaggctggagtgcaatggcgtgatcttggctcactgcaacctccgcctcccaggttcaagcgattctcctgtctcagcctcctgagtagctgggatgacaggcgcatcacgagcccaggacttcgagaccagcctgggcaacatggtgaaacctgtctctgctaaaatacaaaaaattagctgggtgtggtggcgtgccaccatgcctggcctgcaggctctattttctacaaaacaacccccatctgtaaaccattcttcatctggattctctcaaggggtctcccgtaaatctatccaactagaatagatctgctccaaagtttccacataggtgtgttccagtgtccccaaggtgggcaagggaaggagggtggcagcattcaaggactcatatatctttaaggtcaagtctggggtgtctaacagtggggcttgattttgagttaaccttccccgagttagccagtggctccctttgatttccaacacattctggacctggtaaggagtataaacttcaagggattggcctagcatgagtttggagatatccctgaccaggaggctggtggctgccactgccctaagacagccaggccacacctgggctactgggtccagttgatttaaaaaataagtcactggcctttggacaggccctagcttctgaattaggacttccagggctttgcccagagaggtggaggctatctggaaaccccgggggtagcactgtccaagtacagtggggagcttcctgagtctctggatccttccattcaaaggcaaaaatgtaggtggagtcaggatgcagcatatattaaagaaaacatcctttagatccagtacagtgtaaaactgtgtgcacccagggatttgagagtggagtgtgtatgaattagggactgaaggatgtgtgggaacaactgagtcattcactactctaaagtgtggaagaaactggtattctacatttggtttcttcacaggcaggactggagtattacaaggggactgcagggctgaattagtctgttctgtatcaatgtttccaggaggggccatatcccttgtagggcttctggcctcaaatggtattttggcttgcgtgggtagggtaggcctggcttaagctttattttaatattctcctcattgatgacctgtcctgaaatgttggtatcccatacagacttttccactcaaatcaatatcttttctaggactgggggtagcttctgatcttggggaaccaaaagggccagtaaatggattcctttctcaggaggcactgagacttgtatggcattcccctggagggaaactgaggctcccaacttagataataagtcatgaaccattaaaggaaggggacactcagggacatataggaaggaatgagtgatagccttagatccaattttacaagtcaaaggaaaggtaaactgtcttaccttgggttgtccatctgttcccgtcactgtacaactggcgctgaacagagatccatcaggatgggtcaggacagagtagggggctctggtatccataaggaattcagtttcctacctgccatattgagggtgacccaaggctccacagtggtgatggtgatggaactcttcaggactggaggcagataagcatttgagaacacctcattcagagggggtagcctttttatttgagaggccagcaacaagaggagtgggctggggaggtctactccatcctggcttcccagaaaagaatggacagtcctttctccagtgcctcttcttacagtaagcacactggttgcaccccatttccatggacattgggtggggtttaatccccacccccccgcattcaggtttctctgttacctaaggtcacctcaaggtgggcctatgattatagcagccaaaatgtgtgtcttcctttttattctctcatttttctacaccttctctgcctggtcccagttgttaaaaatgttgaagacctctgctaccaacgttgcttgaagggtctaagggtcagctttcagcttttgaaggttttcccaaatgtctggcacagcgtgggttataaaatgcatggccagaagtgttaggccttcattggtccttgggtctatgttactatactttctaaaagcctcagagagcctattaaggtacccagctggattttcatccacttcctgagcaattattttactttattatactttactggttttgtctgacaccctctgatatgcaattaaggaagtgattgatccttaaccagtccctgtcatccgtataaacccattgcgggttctgctctgggactgcctcaccagatacccagtaaatgacatggccaggattatatctggccatctcctctgcatatttcttaccctttccaagattcgagttttttcaccaggagtacaacaacgagttaggactacaagaacatcttgtcaagtcaaaggaaaggttagactaaacttaataaattcatcactaaacctatctggattgttcaagaaccggccaaaccaatccttgccttgatttatgtctgacattggtaagggtccatgtacctgagttgcccctctagttccatccgttacctcccagggggaaagcagccctggtatggtggggaagtgaaggagggtgctgacttggagcccagttggagccacactggggacagcactgagggttgttgaggagtagaaggggaaagccttcctgacccagcatggtatggaggaggctccagacagaaggagaaaggatccacagtagcagagaggcctgcttcccaccctgcccttagaaaggtagtgagagaattgagccctaggggttaaaatctgagacaggacttggctcatctctcagctgttgcttgagaggtaccatataaacctggcaggagtcctagagtttgagatccagatataatttcctgaaggcctgcatgtatggaatctcaagctatttattagaattttttacagtatatatccaattggaaaatgatgttgtaactgaaggaccccattctcaggtcatttctcttggtaccccaggggatactgaggccaagcaacatcacagagaaacacgagcttctttttctttgtaatatctcatttaaactgatcccaattacagaggatgcatccaagggggggaatcttttgggacgtctgtagtgtttcccatggtagagctggtgtcctgtaatcaagaggtctggtgagggatgcagcctctgactctgacagtcttcacaattgcagcacacatcctggtctgactcatcccagaccttcaaatccctggcaagaactaagcaagccaaagaggacagagggaggagagcagaacgagggggcttgagagcctttagctcttggatttgccagcttcaacccacaaagtctagcaagtagtagattttacatcagctccaagtagaacttactctacacccacatttatttacatggactctaacaagaaacgagatgatgtactagacagaggaaaaatttcatctggcctaatgagtaaggcttccttccaagaatcctggagggtggcttcacccatgcaacaaggaccagaaacaagaacgcatttccattcagacaactgacaaaacagattataaacgtccaggctccacaaagaagaatacggtcagggaaaatactgagtggtttcagtatttgaaacaaaagagaattccagattgccggctggtacctagcccacacatgtctggggcagttccctagaccaatctcagaagggccagccagaatcactccaactgcctacgcaagtttcccagaagggctaactggaatcaccccaacttcccacccaaatttccaaaaataagggagagaaggagagacaaaagaaagaaagaggcccttatcaatgtcagacataagtcaaggcaaggattggtttggccggttcttgaacaatccagataggtttagtgattaatgtattaagtttagtctaacatttcctttgacttgacaagatgttctagtagtcctcactcattgtactcctggtgaaagtttcaaatcttggaaagggtaagaaatacgcagaggagatggccagatataatcctggccatgccatttactgggcatctggtgagagagagagagagagagagagagagagagagaagaagaagagcagactcacctagggtccagacttgactctccaaagcaccaacaccaaagcaatggtccagagtggccacctttgttaccacctggtcagttgcctctgtcctccaggaagtcttgctaactcctgtggggacctaaaatgagggtcccatctggggtaccaggagatgttacaatcatccttggttcttgtagtcttccaggatagaaatcaagtgagattgctgggtgtggtggctcacccctgtaatcccagcactttgggaggctgaggcaggtggattgcttgagcccaggagttcaagaccagcctgggcaacatggtgaaaacccatttctactaaaaatacgaaaaaaaacagctgggtgtggtggtgcacacctgtaatcccagctacttgggaggctgaggcaggagaattgcttgaacctggaaggcagaagttgcagtgagctgagattgtgccattgcactccagcctgggcgacaaaacaagactccatctcaaaaaaaaaaaaaaaaagaaagaaaaagagaatgtttattttagcttgtgcacaagaaaggtcagcactgcaaaaggaaaagggtgggctgcaccccaaagggagcaggttgatctgtcttataggggcctagctgctgtgacgtgcctgtcattgaatgtttaggagggatttctttggtgcctgcacagtggttcaacacgctttttcatacattgtatataacattagcattttaaatcacctctgggcatgatttttagcattaaaataaggaaaagttgaaacaagcctagctgtacttgcaggtccctggggaagtccctaggcccctaaagcaggaacttgtggttactagcttcttgggcctttgatgctgattggctggagattaggtaagctacatcttgagtaaggggcttttcttctttttctctggaccacatcaaaacaggaagtcagccagcttgcctgtcacaaaaccaggagtcaataaataaaatgatttattatttgaataatgtatttgtaggttcttttgggttctctacacatacaatcatattgcttatgaattagtttaattccttccattctcatctttataacttttctttaggctttccaatagataattgaataaaagatatgatgggggcatcctagtcttgcttctgatcacaaagaaaatactttccattggtttttgttgttgtttgagagggagtctcgctctgtcacgcaggctggagttcagcggcacaatctaagctcactgcaacctttgcctcctgggctcaagcgatccttccatcttagcctcccaagtagtagggactacaggcacatgccaccacgcccagctgatttttgtatttttctgtaaagatggggtttttgctcaggctggtctcgaactcctgggctccagtgatccacctccctcagcctcccaaagtgctgggattacacgcatcagccactacacccagcctgttttcaatattttgctattaagtatgatgcttaccgtagcatttttgaaagtatacattattgtattaaagaagtttccttctacttttaattgtttaatcataaatagatgtttaactttatcaaatgatttttctgcatctgtctcaatgatattaatatccattgttgatcattaccttgatgtagagttgctaactaagatacaagacctccagttcaatttgaatttcaggtgacaattaatttttagtataaatatgtcccatgccatttattggctaaatctggaaacctgtctagttccattatttcaccagggctttgcaaaatggggatttttaatgtattattttctcttcatttattaactacaatgctattatacaaagaagcatcccctcattaattctctggttaccctaaattgtagttaatacagaaaaagcaacttaaatgcttcaattttcagttttagtacattctctctaaaggtaaccaaaacgtgtgtgtgcgtgtgtgtgtgtgtgtgtgtgtgtgtgtgtgtgtatgtaatatccttatgaatgcatggatttttaacatttgaagtggtcaaaccttagaccagtgggagctgtcttggtttatggtacatttcctacccagaaccacaatcatccatttctaaaagagccacaattcctatgattaccaaattgtatttatttatttattttgagacaaagtcctgctctgttgctgaggctggagtacagtggcatgatcatggctcactgcagccttgacctcctgggctcaagtgatcctcctgcctcagcctcccaagtagctgagactacagacgtgcatcactacacccagctaatttttaaattgtttgtagagacaaggtctccctatgttacccaggctgctctcaaactcctggattcaagtgatcctcctgacttggactctcaaagtgctgggattataagtgtgagccacgtgcctggccccaaattgaatttagacactataatttgagcactaggggaggaactgcctttaatatttttaattttgtaaaacatttgcacagttccagagccaaaacttgacaataagttatcttcacagagctttagctgccatccctgtcctctccacatttcctcccttctcctgtgagtaaccatttttatgggattttcattcaactttccatcatttctctttgaaaatatagggaaagacatacatatacaagtgtgcgtgtctgtgcatttccctttccttcttttgcaaaaggtagcatattatagcatatcatacacattgtgttttcttctttttgttttgttttgttttgtttttatgagaccaagtctcactcggccgcccaggctggagcgcagtgtcacgatctcacctcactaacctccacctcccaagttcaagcgattctcctgcttcagccactcaagtatctgggattacaggtgtgtgccaccatgcccggctaatttttgtattttttagtagagacgggtttcaccatgttggccaggctggtcttgaactcccgacctcaggtgatcctcccacctcagcctcccgaactattgagatcacagaagtgagccactgcgcccagctcacactgttctttattttactttttttacttgacttttttttttttgagacggagtttcactcttgttgtccaggctggaatacaatggcacgatcttggctcaccgcaacctctgcctcctgggttcaagcaattctcctgcctcagcctcccgagtagctgagattacaggcatgtgccatcacgcccggctaattttgcatttttagtagaaatggagtttctccatgttggtcaggatggttttgaactcctgacctcaggtgatccgcccacctcagcctcccaaagcgctgggattacaggcatgagccactgtgcctggcccatgagccaccacgccaggcaggcacgtactatttttcattcccactagcaatgtgagagtgccaattttcccacaaccttggcaagagtatgttatcaatctgataggtgagaaatggtatctcgatacagttttatgttgcatttgtagtatcatgagataaatcatttgttcatttaagggtttgcattttctatgaattctgttcttttgttttcttaccttgttgtgtttttgtcatgcataaaattgtaattattatgtagtcaaatgtatcagtcctttcttttattgcttctgtaatttgaatcaggtagcaaaaaaaattgaccactgccaggttataaagaaattcattggccgggcacagtggctcatgcttgtaatcccagcactttgggaggtcaaggcaggaggattgcttgagcccaggagttcgagaccagcctgggtaaaattgggaagttctatctctaccaaagaattacaaaaattagccagttgtgcaggtgtgtgcctgtagtcccagctattcaggaggctgaggtaggagaattgcttgaaccaaaggggcagaggttgcaatgagccgagatcatgccactgcactccagcctggacagtagagccagaccctgtctcaacttaaaacctaaatgaataaattcattcacatttagtagttacagggtttcacattttaaaatttagatctctgaccttttcacatttgtcctgctgtgtggtttgaggaatgggtttaattttatattcttccatagagttgtcagcttactccagtatcactgattaaaaagtccttcttgtctccaatgatttgagatgcaacctttatcatatactaaatatctatatgcatttgggtctgctctggattctctattctgttccttcattctgtggtattcatgtgctaataccacactgttttcattagaggttttctgttttaatatctagtcaggtcggccaggcgcggtggctcatgcctgtaatcccagcactttgggaggctgaggcatgtggatcacgaggtcaggacctcaagaccagtctggccaacatggtgaaaccccgtgtctactaaaaatacaaaaattagctgggcatggtggcacgcatctgtaatcccagctgctcgggattacaaaaaacaagaacagctaagaaagttctgaaaaactcaggaggctgaggcaagagaatcacttgaacccaggaggcagaggttgcagtgagctgagattgtgccactgcactctaggctagcgatatatatatatatatgtgtagtcaggtcagtggtgcctccctactctggtctttttcagaattttcttagctgttcttgtttttctcattctcccaaataagttttacaataacttctctaattctagataaaaacctgatgatatttttggagggattgcattacatttttaaactaactttttgagagatatttttattatgtgagtctcctatccaaaaccattgcccttccatctatatatgttcatgtttacctttgtgaataatagaaaagcagacactattcacgtttatctttaaaaaaaaaaaaaaaaaaaaaagcaaaataggccgggtgtggtggctcacgcctgtaatcccagaactttgggaggctgaggcaggagaattacttgagtccaggagttcaagaccagcctaggcaacatggtgaaaccccatctctacaaaaaatcagctaggcatggtggtgtgcacctgtagttccagctactcggaaggctgaggtggtgtcaggcctctgagcctaagctaagccatcgcatcctctgtgacttgcacgtataagcccagatggcctgaaataactgaagaatcacaaaagaagtgaaaatgtcctgccccgccttaactgatggcattccaccacaaaagaagtgaaaatggctggtccttgccttaagtgatgacattaccttgtgaaagtccttttcctggctcatcctggctcaaaaagctcccccactgagcaccttgcgacccccactcctgcctgccagagaacaaaacccctttgactgtaattttcctttacctacccaaatcttataaaatggccccacccctatctccctttgcccccaccctatctcccagagtagggaggcaccactgacctgactacatatatataaatatatatatatatatatatatatatatatatatatatatatcgctagcctggagtgcagtggcacaatctcagctcactgcaacctctgcctcctgggttcaagtgattctcttgcctcagcctcctgagtttttcagaactttcttagctgttcttgttttttgtaatcccgagcagctgggattacagatgcgtgccaccatgcccagctaatttttgtatttttagtagacacggggtttcaccatgttggccagactggtcttgaggtcctgacctcgtgatccacatgcctcagcctcccaaagtgctgggattacaggcatgagccaccgcgcctggccgacctgactagatattaaaacagaaaacctctaatgaaaacagtgtggtattagcacatgaataccacagaatgaaggaacagaatagagaatccagagcagacccaaatgcatatagatatttagtatatgataaaggttgcatctcaaatcattggagacaagaaggctgactctcttttcggactcagcccacctgcacccaggtgattaaaagcttttattctcacacaaagcctgtttagtagtctcttcacacagacatgcatgaaaggtgggaggatcacttgagcctgggaggtggaggttgcagtgagctgagattgtgccactgcacgccagcctgggcaacagagacatcctgtctcaaaaaaaaaaaaaaaacagtaaaattgatatgtatagatttgtgtaaccacctccatgaaggggtaggttgcccctccacacctctgggtgtttctcgttaggtggaatgagagacttggaaaagaaagagacacagagacaaagtacagacaaagaataaagggggcccagggaactggcgttcagcatacggaggctccaccggcctctgggttcccttagtatttattgatcattcttgggtgtttctcggagagggggatgtggcagcgtcataggataatagtggagagaaggtcggcagataaacacttgaacgaaggtctctgcatcgtagacaaggtaaagaattaagtgctgtgctttagatatgtgtacataaaaacatctcaatgccttaaagaacagtattgctgcccgcatgtcccacctccagccctaaggcggttttcccctatcttagtagatggaatatacaatcaggttttacacgagacattccattgcccagggacgggcaggagacagatgccttcctcttgtctcaactgcaaagaggcgttccttcctcttttactaatcctcctcagcacagaccctttacgggtgtcgggctgggggacggtcaggtctttcccttcccacgaggctgtatttcagactatcacatggggagaaaccttggacaatacctggctttcctaggcagaggtccctgcggccttccgcagtgtttgtgtccctgggtacttgagattagggagtggtgatgattcttagggaggatgctgccttcaagcatctgtttaacaaagcacatcctgcacagcccttaatccatttaaccctgagttgacacagcacgtgtttcagggagcacagggttggcggtaaggttacagattacagaacaaaatggagtctcctatgtctacttctttctacacagacacagtaacaatctgatctctctttcttttccccacacctccacaatcaagatacagtttcatcaccccaaaacttctctcatgctgtccttttgtagtatccctccccaccaacccctggaaaccagtgacctcgtctctgttcctttaatcttgtgttttcaagaatgtcatacaaatggaatcagaaagtacgtcacctccagtcctatgtacccatttgactatggaaaatttccactcgaatgtcccacaggtaccttagctcaacctcattgctctccttccaatatgcccctcctcctatgtctagattctagtcaaacactatgccatcatccagcagtccaagctaggagtgtcatcctgggttcctcttttttcctttcacccttctttctaattattcttttttttttttttttttttttttttttgagacagagtttctctcttgttgcccaggctggagtgtaatggcacgatctcggctcaccacaacctctgcctcccgagttcaagtgattctcctgcctcagcctccagagtagctgggattacaggcattcaccaccatgcccagctaattttgtatttttagtagagacggggtttctccatgttggtcaggtggttttgaactcccgacctctggtgatctgcctgcctcggcctcccaaagtgctgggattacaggcatgagccactgcacccggctctaattactctcttaatctcattgcttatatgttctttatatctctcaaaacaatctatttctaaatccacaaccattttacaagtgattctggcaaccacctctcaactggattattccaacagctttctgggtttttttgctgagtcttatccttttgagtctctatctacatcacagtaagcatgatcatcctaaacaaacacaaatcttgttaagtcattcccccaatcccccactccctgccacttaaaacccttcacgggttgtcccttgccctcaggacaaattgtaagctccttaggtgacattcaagacttcctataattcaagccttcctctcctatctcaacccaaaactcctgttctcaccctacatgtctcccacacatactcccacttgggttgcttttttaaagtctggaatgtctttctcctcgcctttgtttttttttctttcttttttttttttttcttttttgagttggagtctcactctgtcacccaggctggagtgcagtggcgcaatctcagctcactgcaacctctgcctcccgggttcaagcaattctcctgcttcagcctcctgagtagctgggattacaggggtgcaccagcatgcccagctaattttctgaatttttagtagagatgggggttttaccatgttggccaggatggtctcgatctcctgacctcgtgatccgctcacctcagcctcccaaaatgctggtattacaggcatgagccaccacgcctggctctcctcacctttcttagctaattagtacttgtccttcaggtctcaccttggctctaacctcctggctggaccaatgctctacctttctaattcctgcaggaaaacactggacttttctctttttccttagtagagaagttttcaaagtgggactgcagacccttgcatgtccctgatcccttcagagggtccctgaggtcaaaactatttttataataatactaagatgttattcaaatttttcactcttaatatttgcactgatagtgcaaaaacaatggtaagtaagactactggcccttgccccaaatcaatttagctaataatcatcagattaatggaatcttcttgttttaatattacaccaaaactctacaagtggaagtatcttaaaggttagttgcaatatggtgtctgaaacgatatcagtgaattatttccatgctattacagtaaaatcccttggtctatattgcactttgcatggatcttttacccattcatagttttatagcatcatgcaacaggaatttggaaaatattggtgcagtgagttatacagctttccaaatgttgaaacatttgttataaaatactgaaaaattatagtcatagatatccacatcattctaatctgaaaggcaataagcatttgggaagctgtcaagctcatggtggcagattaaatatacttccatattaccactacttatatatgtgtggctacattttttttggtatacgttaaccgaaacaaactatcacagcacattgaatgcaaaagcagacattggccaggcgcagtggctcacgcctgtaatcccagcactttgggaggccgaggcaggaggattgcctgaagtcaggagttcaagaccagcccggccaagatggcgaaaccccgtctccactaaaaatacaaaacactagccgggcgcagtggctcgcacctgtaatcccagctacgtgggaggctgaggcaggagaatcacttgaacctgagaggcagaggttgcagcaagccaagatcgtgccattgcactccagcctgggggacagagtgagactctgtctcaaaaaaaaaaaaagcagaaaaaaaagcagacattaagatccagttgttttccatcaagctggacattaaagagatttgcaaaaatgcaaaacaatgctactcttctctgaccataatagaattaaagtagaaatcaattaacagaaagatgtctaggagatgcccaaatatttggaaattaatcactcacttctaaataatccaggagtcaaagaagaagtattaagaagaaatagaaaatatttttcacttaatgaaaataaaatataacaaaatgtatgtaagcaattaaggcagtttttagggggtaaatttatattagcaaacacatatgtcatgaaagaaaatctcaaatctaaccctccacgttaatattgtagaaaaagaaaagtaaatgaaatccaaagcactgaaggaaaaagaaaataaagagcagaaatcaatgaaattaaaaacaggaaaaatcaatgaaaccaaaaattttccttatgaaaggtcaatacaactaataaacctctaaccagacgaaccaagaaaaaaacagagaagacaaaaattacctatattaggaatgatagaagagatatcactacagtatctataaattttacaacttacatgtaatagatcagtcccttgaaagatacaaactaccacaattcaccaaagatgaacaagataaagaggtcttagaactattaaagaaattaaatttatagttaaatatcttcccccgaaaatctctaggcccagttttattggagaatgttatcaagtattattgaaagaaataacatgaattctaaaaaattctctttcagaaaatataagaggagaaatactttccaatttgttttatgaggctagcattgccttgataccagaagccaaagacactacaatgaaagaacactataaatcagtatccctcatattagcaaattgaatctagcaatataaaaaggacaattcatcatggtcaagtagggcttatcctgggaatacaaggtctgttcaaaattttcttgacaaaagtgaacatctagcagggcgtggtggcacacacctgtaatcccagcactttgggaggctgaggcaggcagatcacctgaggtcaggagtttgagaccagcctaactaacattgtgaaaccctgtctctatactaaaaatgcaaaactagccgggtgtggtaggaggcacctgtaatcccagctactcaggaggctgaggcaggagaattgcttgaacctaggaggcgaaggctgcagttagccaagatggcaccactgtactccatcctaggtgacagagcaagggttcatttcaaaaaaaaaaaagtgaacatccattcagggtttaaaaaaaaaaaaccaactcagcaaactaagaagagaaagaaacttccttaatctgctaaaagggcattttgaaagacacttaatgttagaagtctaaatgctttccaccaaagattgagaacaaagaaaagaatgtttgcattcaccactcctagtcaatattgtactgaaagtcctggccgatgtaataagtaggaaaaggaaacaaaagtaatgtcgattgaaaaggaagaaaaataaaactgtctttattcactaatgacatagttgtcacaaaaaaaactccaggaaatctacagaaactcctaaaactaataaatgatttttacaagatcacagaataatgtgcaaaagtcaatcatatttttaagcataaggaaacaaaaatcagaaatttaaaaaattttaataacatttataatatcataaaatatgaaatacatagggataacctgacaaaagatttacaagacctatacactgaaaactaaaaaacattgctggtagaagttaaggaatggctaaataaattgggagattgccgggcgttggtggctcacgcctgtaatcccagcactttgggaggccgaggcaggcggatcacgaggtcaggagatcgagaccatcctggcaaacacggtgaaaccccgtctctactaaaaatacaaaaaattagccaggtgcggtggtgggcgcctgtagtcccagctactcgggaggctgaggcaggagaatggcgtgaacctgggaggcagagcttgcagtgagccgagatagcgccactgcactctggcttgggtgaaagagcgagactccctctcaaaatataaattaaataaataaataaataaataaataaatagggagatataccaggttcatagattataagatttaatgctggccgggtgcggtggctcacgcctgtaatcccagcactttgggaggctcaggttgggggatcacgaggtcaggagatcaagaacatcctagccaacaggcctagccaatatggtgaaaccccgtctctattaaaaatacaaaaattagccgggtgtggtggcgcacgcctatagtctcagctactcgggagcctgaggctggagaatctcttgaaaccgggaggcggaggttgcagtgagccgagattgtgccactgcactccagcctgacaacagagtgagactccatctttaaaaaaaaaaaaaaagaaaaaagaaagaaaattagatcaacagaacagaatcaagagtccacagatagatgtacacacatgcataatcaactgatttttgacaaagctgcagggcatttcagtgggaaaagataatgttttcaataaatggtactggagcgactgggtattcacatgcaaaaagatgaaacttcggccaggcacagtggttcaggcctggaatcccagcactttgggaagccgaggcaggtaggtggatcacctgaggtcaggtgttcgagaccaccctggccaacatggtgaaactccatctctactaaaaatacaaaaattagccgagcgtggtggcaggcacctgtgatcccagccactccagaggctgaaggaggagaatcgcttgaaccttggaggcagaggtgcagtgggctgagatcgcaccactgcactccagcctgggcggccgaatgagactctgtctcaaaaacaacaacaacaaactcgaaatggaacatagatgtaaatgtgaaatatcgagctatcaaacttcttcttcgccccccaaagtgctgggaatacagatgtgagccaccacacccagccaatcgaactatcaaacttctgaagaaaacatttaaaaaaactttgtgagttttcaccaggctaaggtttttaaaaatacaacaccaacagcatgattcataaaagaaaaaattgataaattggacttagaatccacagtggtacatgccaccatgtcaggctaatttttgtatttttaacagagacgggtttcaccatgttggccaggctggtctcaaacttcagacctcaagtgatccacctgcctcagcctcccaaagtactaggattacagatgtgagccattacacccggcctttttttcaaatttctaagaaaagagattttttttttttgagatgggagtcttgctctgtctccaggctggagtgcaatggtgccatcttggctcactgtaacctccgcctcccaggttccagcaattcttctgcctcagcctcccgagtagctgggattacaggcacacgccaccacgcccagctaattttttgtattttttagtagagactgagttttaccatgctggccagactggtctcgaactcccgactgcaggtgatccactcgcctcggcctcctaaaatgctgggattacaggcgtgagccactgcacccggcccaaatcactgtattttggaaaagataagttcaaaaattagccgggcgtggtggcagacacctgtaatcctagctacttgggaggctgaggcaggagaatcactggaacccaggaggcagaggttgcagtgagccaagattgtgctattgccctccagcctgggtgacagagggagactgggtctcaaaaaaaaaaaaaaaaagaaaaaagaaaagaaaagttcattgatcctagcccttgcctctgcccgtgtgtaggaaaatatcgaagaggattaatgattatgtgtcacacccaaaccttgatgggattttgctctcatgtaacttctgagaacatgagctgcagccacctgtataaaaaccgcaggctgaaaccctccggagcagtccaacggttactttgaaagactctcccaggttgtgatcctcagtaagacttctgaatcaaactaactttaattctctaaaagtaggtttttctctttccttttttttttttttttttttttttgagacagggtctctcactctgtcgcccatgctggagtgcagtggcacaatcttggctcactggcagccttgacctcctaggctcaagtgattctcccccctgagcctcctgagtggctggaactacgggcgcacgaccatgctgggttaatttttataaacattttttggtctcactatgttgcccagggtggtcttgagcttctgggctcaagcaaccctcctgcctgcacctcccaaagtgctgagatgattataggagcaggaatgagcacttggcctgatttttgtcttagttgacaatagtcagtgttcaggaaatggttatttatgattattatccataaaaattccaaagggatacactgatttgtcattaccaaaggggccagagagaacctggcaattatttgggcttaggggaataaaggcaaagctctcagatgagtttcagtctgaagcctggaaacagggaggatgggaggccaggggcaagatgatggattccattttaagtaatagattctaagtctcaagtaaaaatcaaggttgccttttgggtgtaaggtagaaacctgggatacagaattaagaattgcccatgttaggcacggtggctcacgcctataatcccatcacttttcgaggcttgggagggtagatcacttgaggttaggcatttgagactagcctggccagcatggcgaaactccgtctctactaaaaatacaaaaaattacccaggtgtggtggcccacgcctgtagtcccagctgctccagaggctgaggcatgagaatcacttgaacctgggaggcagagttgcagtgagccgagactgtgccactgcactccagcctgggcgccagagcaaggctctgtctcaaaaaaaaaaaaaaaacttacagaattaagagttgctcatgcagaggaaaacaaaaagatttattgtcattgtcgttttccttttttttgtggaaacacagacactaggactttaagaaaggcaggagccagatctaatgaatctctgggttctcccagcagagtgatcctccctactcagtgatctccactgagcaggagccaccaattctctttgtaacttaatggaagtggctttcccctgtctgcacctcagtttcatttgtaaaatgaggaaaagcaaacctacctctgagggctgttatgagatcatggtttggaattttcctggccaaaagtgaatgcgcaagtggtgtctcgtgtgacaacccatgatccatccaccaaatagaaaacaatgtccaaacacacaaaatatcaagagtatacatacaaatggtgggagtgtaaattaatacagtctgacagtgtctactaaagctaaacacatacctgccctacgaccagcaattccacacttgggtctattttgtttttgtttttgtttttctttgggagggggatctattttcagaagaaatgaatacgtaagtttgtccaaagaaatgtactagaatattcatagtgagagacaggactagctggatttcctaggccgactaagaatccctaagccaactgggaaggtgaccgcatccacctttaaacaaggggcttgccacttaggtcacacccaaccaatcaggtagtaaagagagctcactaaaatgcgaattaggcaaaaacagaaggtaaagaaatagccaatcatctaacgcctgagagcacagagagagggacaatgatcggcgggatataacccagcactggagcccgcaaggcaatcccctttgggtctcctcccattttatgggagctctgttttcactctattaaaccttgcaactgtacactcttctggtctgtgtttgttatggcttgagctgagctttcgctcactgtccaccgctgctgtctgctgccatggcagctgtggcagacctgccgctgacttccacccctccggatccgggtgtccactgcacttctgatccagcgaggcggcacccattgccgctcccaattgggctagaggctcaccattgttcttgcgcgggctaagtgcccggggttcctcctaatcgagctgaatagagctataacactcaccgcatggcccaagattccattccttggaatccgtgaggccaagaaccccaggtcagagaacaagagacttactgccatcttggaagcggcccaccaccatcttgggagctctaagaacaaggacccccagtaacaatagcactataacacccctaaactggaaaatatccagtctgaggtatagggcatagtcataaaatggaaaccatccagaatgaaaatgaaagaactatttctacacacggtatgcatgaatctcacaaaaacaacattaactaaaagaaaccaaacacagtacacagagtactggtctagagagaaggagaattcaaaacaaacaaaagtaacccagctgttacaagtcagggcgagtccagccaggcacagtggctcatgtctgtaatcccagcactttggaaggctgaagtgggaggatcatctgagtccaggagttcgtgaccagcctgggcaacacagcgaaaccctatctctacaaaaaacattttaaaattagcaaggcgtggtggcacacgcctgtagttccaggtgcttgggaagctgaggtataggattgcttgagtctgggaggttgaacctggagtgagtagtgatctcaccactgcactccagcctgggcaacagagcaagaatctctttcaaaagatatatttttaaaggctacatggggtgggtcatgcctgtaatcccagtgctttcagaggctgaggagagaggatagcttgaggccagcagttggagactctagtgagctatgatcgtgccactgcactccagcctgggcgacagagactctagctcttaaaaaaaaaagaaaaaaacagatgaatgataacctttagaagggatcgggaggccggatgtggtggctcacgcctataatcccagcactttgggaggccaaggcaggcagatcacttgaggtcaggagtttgtgaccggcctggccaacatggtgaaaccctgtctctactaaaaatacaaatattagcctgggcaacagagtgagactccgtctcggggcggggagtggaggggggagaagaagggatgggggaaaggggagcacatgaggcttctactgtttggttttgcgatctggattcaggttgtatgggcatgttcactttgtgtaattttgtcgagctgtaatgatttgtgctcttctctttatttaacttcaataaaaggtttacttaacaaaaattgtagctggtgtgaagggtagcagtgtttccctggggccaagagtacaggctttggggacagacagacctgggtcccaatctatgctttgtcccttcggcacattgttgactgtggctggtggcttcgtggctctgagcttgtctccttctctataaatgaggaaacataatacttgcgacgatgatgcctgtaaagcttaagcgcaggacctggcatagatctgtaaggcggaaacctgggatacagaactaaggtctatggatctcctgtgctacccaacttctgggcactcgctgcctccttttccccagcccagacgcgtgggttctactcgattggttgctcactgcgggctcggggctcctcaatcccggggtaaagcccagtatgaaatgtcaccttcaggggcagctcggatcttcccacgcccgcgcggcgcacaatctttggatcagcgccacgtggagaccttacccgcccgtacgatcaatcccttctgtggaacccagctcaaggaccctccagcccagacactagaaagcgaagagcagttggccgccagactgtccgtgccagagctctgcgaacttactccgttgaaagagcaacggggctgcgccacctcccggagagaacccccagccctccacggcagggcgagatggcgccaccgcgtgatactgcgcacgcccacagctcccgtcccgccctcgcgcctgcgggtacggacagcgcatgagcttatgttgagggcggagcccagaccagcccttcgtcctatcctgcccttccagcacctctcagccgtaacttaaactacacttcccagaagcctcctcagccagggacttccgttgtcgtcagcggaagcggtgacagatcatcccaggccacacagaggccggcttggtcactatggaggagataggcatcttggtggagaaggctcaggtacagtggggacttgggctttttagtccgggccgggctcgcggggagagggtgaagccagacctgagtggggggaggaatggcttccaggaccccggcccaggttggggttattttagaggcctcggtggagagctttgtgccattcgaaggcctgtctgggtggccgagtgatggtaggaggtaaggctcagaaagcggggctgggggagtgagtgacgttagtgggtctttgagacggattgatttcgaaccctggccggtagtgcttagtgaggtcggtggcccggcgttgggattgggtcaggcggtgagtgatatatgggatcccgccgtgcggccgagtgatccccgggtctgggctgcggggctgactgatgttcagggctttgctgatgggggtaatggggcgggtagttaagtattatctgtggcttgcctgagtgatatttaggtctaaggtgagttaggagactgtgacataagggatctttgaggggaaactggggaatgttgggactcgttgaaggcgcagtcactttaacagcctatctaggagagccatgtgacattaggaacctcttgaaggggattgggtggcatttgggtctgataaggagttgatgtgacgtttagatcctagttgggggttgtgtgacactggggacatgttatgagtggtatatgataacataagatctgtttgaggggcaagttgacataaagagcttgtttaggtggccaaaaggtttccaggatctatttagagggtcttaagatatcaggggtctgttaggggctaagtgacatcagggtgaagtggggaggggaacaaacattagtgaagttgggaagctttcatgagaggactgtcttcttccaatgtgagttatcccctttcgtctaggatgagatcccagcactgtccgtgtcccggccccagaccggcctgtccttcctgggccctgagcctgaggacctggaggacctgtacagccgctacaaggtacattcgacccccaacccagaccttgcacaggacctgacatctcatactcttccccactttccaccactctctggatcagcaagtctggagccatccccttctgtcccctctctgctcgcagaagctgcagcaagagctggagttcctggaggtgcaggaggaatacatcaaagatgagcaaaagaacctgaaaaaggaatttctccatgcccaggaggaggtgaagcgaatccaaagcatcccgctggtcatcggacaatttctggaggctgtggatcagaatacagccatcgtgggctctaccacaggtgtgctaaggacacctcattcattcatctgtccacttaacaactatttcctaccatgtgctaggcagcagcaaacaaggcagggcagtgcagtgcaatgttcttcagagtattttgactgatcgaaaggtagaaatacatacatatatatatatatacacatatatatatgtatatctatgttttttttgtttgtttgttttttgttttgagacagagttttgctcttgtccaggctggagtgcaatggcatgatctcggctcactgcaacctccacctcccaggttcacacgattctcctgtctcagcctcccaagtagctgggattacaggcatggaccaccaagtctggctaatttttgtattattagtagagacagggtttcaccatgttggccagtctggtcttgaactcctgacctcaggcgatccacccgcctcaccctccgaaagtgttgggattacaggcctgagccccactgcacctggccagaaatgtattttacattgtgattatctgtatctgtctcttactttttagatagatgtgtaaaacataagtttcaccatgaaatatttagccttactaggtgtggtatatgctgatgttttctatcctattctagtctgttttgctttaaacacagttctggtcatgaccttccaaattgatttcacaactactactggtttggggcctgcagtttgaaacgatgagtaggagtgttaagagattgggctctgaggccaggcatggtgcctcacacgtataatcccagtactttgggagactcaggtgggcagatcacttgaggccagaagtttgagaccaggctgggcaacatggcaaaaccccgtctctactgaaaatataaaaattagctgggtgtggtggcacacacttgccatcccagctacgcaggtggttgaggcacaggatctgttgaacccaggaggtggaggttgcagtgagccgagatcgtgacactgtactacagcctgggtgacagagcaacactctgtctaaaaaaaaaaaaaaaaaaaaaaatactgggccctgatagggactcagagtccttatcagagtatattgtagctgctgctgtttatataggtctaggccttgccctcttgatagtcattgtcactggcatcttatctgttttttcttgtttctgggctctgctcctctggaccaagccatgttcttgtaaaggttttggagaaaggtgtgcgattgtgcctggaattggactggtgggctatgaggaagtgaggagagggtggtatccaggatgaggcctttctctttgacctgtgggagttgggatagtgtggctttccctgagatggcaccatgggtagaggagtaggtttgtgggaagacagggagggcagtccagagcacatgggaggtgtccaggaggctgctggtcagccaggtctgacaatcaggagagagactgagcctggaaacagaagtgtgcctcactagtatgagatgcagggggaggcctgctggacagccagggctggatgtcaagagagaatcagggcggtagacaaggagttcgtgtgaatactggggacggacagcaggagggaaggctggaggccgagaggggacccctcagggtctgaaccagagatgttggggtgtggagattaggagggaggaagggggaaggggcagtttccaggctgacacttctcgttttcctctctcccttctcgcaggctccaactattatgtgcgcatcctgagcaccatcgatcgggagctgctcaagcccaacgcctcagtggccctccacaagcacagcaatgcactggtggacgtgctgccccccgaagccgacagcagcatcatgatgctcacctcaggtaaagggggagcctgcagctgggagggccccatggggaccttgaggacctggccaggagccccagctctgctctcccaccagaccagaagccagatgtgatgtacgcggacatcggaggcatggacatccagaagcaggaggtgcgggaggccgtggagctcccgctcacgcatttcgagctctacaagcaggtgaggcggtgcaggtggcagggaagggagaggccccattgggtctggggttggaggtggaacccctgactcccacttctcttccttcctctgggtttcagatcggcatcgatcccccccgaggcgtcctcatgtatggcccacctggctgtgggaagaccatgttggcaaaggcggtggcacatcacacaacaggtgagccctttcgcccctgccccgagctctcatcttctggcctcttcgccttgctccctgctcgctcactggcactgcacagtaattagaaacagactctggggtcatagcccacgtgtgcatgttactggctgtgctgacttcacctccttgggcctctcctagtagttgaagactcatttcacccggtgatagtgagcagttaatgaaataatgcagtgttttcctacaatgggttgtgacctattagtaattatgaatttcaatttgtgggttgcagccagtattttgaaacatgaaatagaacagaaagcgccagagaacatccacatggtatttataccatggtacaagtatatatggtgcaagttcatctgtttcgtgaaacttgtttcatacagatgtgcacactcatgtatacttgtggttcttcaaaaatatatatatatattttaattcttaaatttttttgtagagatagggtctcactctgttgcccaggctggtcttgaactcctgggctcaagggatcctcccacagtgctgggattacaggcgtgagccatgtgcctggccccaaaaatgtatttcttattgtaggtgccagacaaaaatgtctgaaagtcactcactctataacttttttttttttaaagccctaaaatcttaagcatatgttcagatcttaacacatgtgagccagggagcagtaggaggtagtagttaagcagtatgttttctggggctagactgcctggctttgaaatcttactcccccagcaacttcttatgtgatcctgggtaaattaacctctctgtgactcagtttcctcacctgtcagatggaaacaatcatagtacctatttttctagggtgggtgttcagaagagcaaattgatacaaagcatctggaatgggcaataaatgttagctgttgtcattgttactcatttgcttggtactttattgaacttttactctgtaccaagccttgtgctggaatgcaaagatgacaatcagagatgtcccttgccttgactgggaaaaaagaaaaagacacctagaactcagtcattcagtgactgtttattgaacacccactatgtgccaggatgtgttgtagatgctagagacatgggccaggcgcggtggctcacgcctgtaatcccagcactttgggaggccgaggtgggaggatcacgagatcaggagatcgagaccacagtgaaaccccgtctctattaaaaatacaaaaaaattagccaggtgtggtggcggtcgcctgtagtcccagctacttgggaggctgaggcaggagaatggtgtgaacccaggaggcggagcttgcagtgagcccagatcacgccactgtactccagcctgggcgacaaagcaagactccatctccaaaaaaaatatatatatatatatatatatatattaattagctgggcgtggtggccagcgcctgtagtcccagctactcagcgtgaacccgggaggcggagcttgcagtgagccgagatggcgccactgcacttcagcctgggtgacagagtgagactccgtctcaaaaaaaaaaaaaaaaaaaaaagaatagagacgtggcagtaaacagaacacctccttatggaggtgatgtcttagttggaaatgtggcccgacacagattcgtaaagtttcttttttttttttttgagatggagtcttgctctgtcatccaggctggagtgcagtggtgcgatctcggcttactgcacgctctgcctcccaggttcacaccattctcctgcctcagcctcctgagtagctgagactacaggcacccgccaccacgcccggctaattttttgtattttttagtagagacggggtttcaccgtgttagccaggatggtctagatctcctgacctcatgatccgcccgcctgggccttccaaagtgctgtgattacaggcgtgagccaccgcacccagcccgtaaaccttcttaaaacatgagattttttgtgtgtgatttttttttttttttttttttgagacagagtctcactctgtagcccaggctggagtgcagtggtgctatcttggttcactgcaacctctgccttctgggttcaagcgattctcctacctcagcctcccgagtggctggaattacaggtacatgccaccacatctggctaattttttttgtacttttggtagaaatggggttgcaccatgttggccaggcaggtctcgaactcctggcctcaggtgatccacccaccttggcctcccaaaattctgggattacaggcgtgagccactgcacccggctgtgatttttttttttaagctcatcacctatcattagtgttagtgtattttatgtgtggcccaagacagatcttccagtgtggccctgtgtacccttcacccagattccctaatgttactatcttatgtaaccatagtataattaggaaaaccaggaaattaacagtggtacaatacaatgaactaaagtttagacctccttcaaagtttaccagcttttcccactagagaccctcacttcaggttctgtcgtttttctgagtgaattggggtggtttgtcactggcagagggagggaagagagaaggtgtagaagggatgtagaaatgggaaaagctgctgactggggttgagttttgttttgttttctagagacagggtcatgtctggcaaggcgcggtggctcacggctataatctcagcacttcaggaggccgaggtgggcagatcacgaggtcaggagttcgagaccagcctggcaaacatagtgaaaccccatctctactaaaaatacaaaaaaattagccaggcatggtggtgggcgcctgtaatcccagctactcgggaggctgaggcaggagaattgcttgaacccaggaggccaaggttgcagtgagcgaagatcgcaccattgcactccagcccggccaatagtgcgagattctgtttccaaaaaaaaaaagagagatagggtcttgttctgtcacccaggctggagtgcagtggtgtgatcatagcccactgcaaccttaatctcctgggctcaagcaatcctccccacctgtctctcctaagtaggtgggactacaggcgtgtgccaccatgcccaactaatttttgtatcttcattttcagtagagacagggtcttgctatgttgcccaggctggtcttgaactcctgggctcaagccatcctcctgcctcagctccccaaagtgttgggatcacaggtgtgagcctttttttcctcttgtttttcggggggaattcatctatttgttccggtgacagcacagcttactaagagtgagtaactgaagcaggagcccattccaggataggtggaaggagtagtagagcccagggggagctgagagattgggaggacagggaaggttggggtaggaaggggactgtagtgattgagtaggaaaggctgacggacaggctcggtcagataaggcaattccagggatgggggtttcatgtggaactggttggacatttgcagaacagccaagtaaatggccaaagtcaggtggtcaaggtgtgttttctgtttagagcagaaaaagtcagaaatcttgaggttaggatgctgaatgagcccccagctgatgcaagtatcaagaaagagggaccccttgagccaggtgtaaagtctggatcttagggagtgaacagggcagggctgaagccttgaacagttcctagcttatgacataaaaccactcagtctatctatggactgcatgtctcccttctctggtggctggaaggagagtcctgggggtatgcttcatacaacacaaagcatctgatccttaagaaacaagtgtaactttaagaaacaaggccagggtcaagcatggggtggctcatgtctataatcccagcactttggaaggctaagccaggaggatcgcttgaggccaggagtttgagaccagcctgagcaatatagcaagaccccatctcctcaaaaattttaaaaagctaggtgtggggacatgcctatagtcctagctactcgggaggctgaagagggaggattgcttgagcccaggagattgaggctgcagtaagctatgatgataccactgtactccaagtccaaagggagggcccagaacaaatctgtcttcaaccccattgccaattgtcagttatatcagaacatgcccgtggtccctgatctttttcaggaaattaaaaagctggtccttatagcaaacaggaactcagagctcttggcgaggcagtatgatgtcttagtgtatgggcagcatgcctgttttcttgctgattttgcaagtgctccagaaatgtagactggtttttttctttcttattttagtatttcatatcctgatttttaaatgttgggccaaaaaaatgacacatctggctggacatggtggctcatgcctgtaatcccagaactttgggaggctaaggcgggcagatcacttgaggtcaagagttcaagaccagcttggccaacatggtgaaacctcgtctctactaaaaatacaaaaattagcttggcatggcagtgcacgcctgtaattccagctactcgggaggctgaagcaggagaatcacttgaaccctgaaggcagaagttgtggtgagccgagattgtgctactgcactccagcctgggcgacagagcaagactctgtctccaaaaaaaaaaaaaaagtgacacatttgtaaggatgattcatgatttaggccactgggtcactgtggggtacaagtagatggctattcctcagggctggatgtggggctcacccttgggcatgagggaatgacacaactactaggtatgggtatccaaggaaaaggatgtcttcaaggaattcgcagtttctgttaaagcagaatgggcccctcaggaggctcattcccgcctaactgttgtcatcctgtcatcagctgcattcatccgggtcgtgggctcggagtttgtacagaagtatctgggtgagggcccccgcatggtccgggatgtgttccgcctggccaaggagaatgcacctgccatcatcttcatagacgagattgatgccatcgccaccaagagattcgatgctcagacagggggtaagtgatgctgaaacaaggcccggggtcttggacaggcttgtcgcatgggatgcctgggactgactgtgctgtgcactctcagccgacagggaggttcagaggatcctgctggagctgctgaatcagatggatggatttgatcagaatgtcaatgtcaaggtttggggtttgggatggacaaggggaggtgtggtgtaggaactggggaaagttgggggctggcacctaaggggtggttatcgtgacaggaaggaggtaggagtgcagagatctgagctggcctgccccccaatgtcaggtaatcatggccacaaacagagcagacaccctggatccggccctgctacggccaggacggctggaccgtaaaattgaatttccacttcctgaccgccgccagaagagattgattttctccactatcactagcaagatgaacctctctgaggaggttgacttggaagactgtatcctgctccagaagtcagggaggggccctagttgggaacggggattagatcttcagctcaacttctgccagcaccacagcccagactgtgcaggtgggaccaaggtccagggaggaggggaggtgacagagatggccaaagatgacttccagccccaggcatttaccccatcacacagggaatagtttccttaactcgctgcagatgtggcccggccagataagatttcaggagctgatattaactccatctgtcaggaggtaagtggtggtttctctctggatccaggcagcgggtgtgtgaggacccttcttctctgaaccactctgctgcagtcctgtcccctcatggctgccctgggtcgtgggcgccatctctctcttcctctaccatcactaggggtggatagtacaggggtagtgtttttgtgttttgctttgagacagggactcactctgtcgcccaggctggagtgcagtggggcaatcatgactcactgcagtgatcctcccacctcagcctcccaagtagctgggattacaggcgcccaccaccagtctggctaatttttgtattttttgtagagacagggtttcaccatgttgcccaggctggtctcgaactcttgggctcaagtgatctgtatacctcagcctcccaaagtgtcgggattacaggtgtgagccactgtgccctgccacaggaagtagattttaactctcatccttcaacagagtggaatgttggctgtccgtgaaaaccgctacattgtcctggccaaggacttcgagaaagcatacaagactgtcatcaagaaggacgagcaggagcatgagttttacaagtgacccttcccttccctccaccacaccactcaggggctggggcttctctcgcacccccagcacctctgtcccaaaacctcattcccttttttctttacccaggattggtttcttcaataaatagataagatcgaatccatttaatttcttcttagaagtttaactcctttggagaatgtgggccttgaataggatcctctgggtccctcttaatctgacagatgagcagacgaggtgcatggcctgggttgcagcttgagagaaccaaaatattcaaaccagatgacttccaaaatgtggggaaagggatggaaaatgaacctgagatggagtccttaatcacgggataaagccctgtgcatctccctcatttcctacaggtaaaagacagtaaagaaattcaggtcacaggccttgggagttcataggaaggagatgtccagtgctgtccagtagaactttgcacaatgatggatatgttctgtgttctccagtatggtagctgctcgccacatgtggctaataagtacctgaaatatggctagcatgactgagaaactgaactttttttttttttttttttttttttttttttgagatggagtcttgctctgtcacccaggctggagtgcagtggtgagatcttggctcactgcagcctctgcctcccaggttcaagtgattctcctgcctcagcctcccgagtagctgggaccacaggcatctgccaccacacccggctaaattttgtatttctagtagagacagggtttcactatattggctaggctggtctcgaactcctgacctcaaatgatctgcctgccttggcctccctaagttgttgggattacaggcgtgagccactgtgcctggtcaagaaatggaactcttacacactgctggtgggaatgtgaaatggtaagccacttcggaaaacagtttgacaatttcttatgctaaaaatacacctatcagatgatttagccacttctaggtatttacttaagaaaaaataaggcatacatccatatgaagacttgtaaataaatgttctcattatttttatttgaaatagctaaaactggaaacaacccaaatatccatcagcaagtgaatggataaacaaattgtaatatttgtatgcaatataacaccactcagtaatatgaaaatgaactactgatgtatgcaaaaacgtgaaattcaaaataattatgctgagtgacagaatccagacaacaaataatacataatgtattattctatttacataaagttttagaaaatccaaactaatctaagtaacaaagcataccaatggtatatggggcttggggcaggtgagacggattatagagaaaaaagtaggaggtgatagacatgtttagtttttttgcttgtttgtttttactgtggtaatggtttttcaagtgtgtatgtcaaaacttatcaaattgtacctaatttattgtagttttattgatacctcaataaaattaatagttacatacataaatgtacttgaagttccacctagcacaataaggtaagaaaaaaaattaaggcgtgggactggaaaagaaatgaaactcttcattattcacaaatgtcatgattgcatatatggaaaatctaagtctacacaaaacctattaaaattaaatagtgaatttagcaatgtggctaaacaaaggtcaatataaaatattaaatataagccaggcatggtgacatgcatccacagtcccagctactcaggaggctgaggcaggagaattgcttgagcccgggagttcaagtccagcctgggcaacacagcaagacccactgtctctgaaaaaaaatcaaatacatatatcagcaataaataaataggaaattaaattttaaattataacatttatcaaataaattcttaagtgccaagaataaatttaaaatatgagatataaatagttaaaattacagaatattgacagaaatcaaagaagacaaataaatgttgggatacaacatgttaatgtattggaagattacgagtaaaaatattaattctccacaaattgatctataaacaacgcagcgccaatcagaatcccagcagttttgtcctgctggaaactgacaaactgattctgaaatatataagtaaatgaaaggctcagaaatagccaagagaatatttgaagaaaaaagcaaagctggaagacttacaataccaaatatccagactgatggtaaagctgttgtaactaatgtagtgtggtatggccttaccaatggacaaatcaatggaacaaaatatggagtccaaaaagaaaataatatactcacttgatttctgacaaagttaatcctgtggtacactggagtatgagtgatcttttattaaatgttgccttgtcaactctatgtagataaaataaatctgtgttaccagatgaagagtttttaattgggttgttcaggttattggcatgttgaacaaagaactgaacaaaatgcacagacaaagaaaaagcaacaaaagcagagatttattgaagtgaaagtacactccacagagttagagagggctcaaacaagtggctcaaaagtccagattataatgttccttggggattttattaaactaaaagagcatagtagcacgcctaaacgtcctttagaagcctctaacaggtcatactctataggaatgaagaattctgcccaggaccaatcagaggcaccctgcaaatgagggattcagaatgaaccaatcacaggcattcccattgtgacacaggggaggggaggttcagagaaggagggcctttggcctcgttatttggtcacggagaggtgaggttttcctcttagtccaattccaagaagtcagcaggggttggccttaggttccctgtctccagactctattctcctgcctcatttggacccctacaatctaattgtgaatgtaaaaggtaaaaaaagtttcaaataattacgtagaaggatagcttcatgacctttggtttggcaatattaatcattttttaaaatagtttttttgtttgtttgtttgtttttgaaacagagtctcactctgtggcccaggctggagtgcagtggcgcaatctcggttcactgcaacttccgcctcccaggttcaagcacttctcctgcctcagcctcctaagtagctgggataacaggcgtgtgccaccacacccagctaatttttgtatttttagtagagacggggtttcacctgacctcatgatccgaccaccttgccctcccaaagtgctgggattacaggcataagccactgcacctggctggtggcacacattctttttttttttttttttttaaagacggagtttcactcttgttgcccaggctggagtgcaatggcacgatctcagctcaccacaacctccgcctcctgggttcaagtgattctcctgcctcaacctcccgagtagctgggattacaggcaggcgccaccacgcccaactaattttgtatttttagtagagagagggtttctccatgttggtcaggcctgtctccaactcccaatctcaggtgatccacctgcctcagcctcctgaagtgctgggattacaggcattagccatcgcgcccagccacacattcttatacaaacagttttaacttggttgtaaatatctccactcaaaggatctggcccatgcagaaacacaagacttgtccctcaatataaatcgtaagataggtggtgttttgtacagtctagaaaaccaggccaagttgcagcaaacccctaggttttaatgttaataaagtcctcttggacttcatgggcccaaaagttccagtgttgtattgcttttgtaagaaaatttcaaaactgtaaaaaagacaaatgggtagttcttggaataccaaataagtagtggttaaactggaggtatcagtgcatagctaaggcactaaatttgttataggtcagaatcaactccctaaaatttgatgctcatagccatgaaataaggtggtagagcaatgcaggttccctgatcaaacagcctttcaaaaggagtcttgatcttattcaaagatcatgtcatttaatttgcactatggcctttgccacacataaattatgcagtaattccagtattccactaaaaatccatgacctgaatctcattatgggaatacatcaaactacaaaattgagagacattatataaagtaacaacttttttcttcaaaaatgttgtcataagaaacaaagaaagggtagtaatatcacatgatatcaaagtaggggattcttgctcccttcctcccacaaaagtggacaattagctatccatgaataaaaatagctctaggagagctctggaatccagttaagaagctgcagcaacacagtggagcaaaaaaacacctagaataaccaacataaggggcaggaagaacagtttcatttttaaaaattgaaatcatatcaagtatcttctgagatcacaatagaaaaaaatccctaaaaatcagtaagaagcagaactttggaaactgtataagtacatggaaattaagctcctcaatgaccactgggtcaaggaagaaataaaggaggaagtaaatttcttgaaacaaatgaaaatagaaacacaacataccaaaatgtgcgggatacaggaaaagcagtgctaagaagaaagtttatagcaataaatgcctacatcaaaaaagtagaaaattttaaactatcgaatcatgcaccttaaggaactacagagcaagaacaaaccacacccaaattagtacaaagaaagacataataaagatcagaaaattactaaacaaaatagagactcaaaaaaatacaaaggattaacaaaatgaaaagttggttcttggaaaagataaatagaattaataaaccactagctagactaaccaagaaaaaataaaagaaccaaataaacaaaaccagaagtgtattataactgataccacagaaataccaaagatcatcagagactacagtgaataactatacactaacaaactggaaaacctaggggaaatggataaattcctggatacatataatttactcagattaaatcagggagaaatacaaaacctgaacagaccaataatgtgtaagaccaataatgattcaaatatattgaatcagtaattaaaagtctcccaacaaagaaaaagtccaggacttggtgcttcactgcaaattctaccaaactttcgaagaactaacaccaattctcaaactattcccaaaaattgaagagaagggattctccctagctcattctaagaggccagcattaccttgagaccaaaaccagacaaggatgcaacaactacaaaaaactagaagccaatatccctgatgaacatagatgcaaaaattctcaacaaaatactagccaaatccaacagcacatcagaaaggtaatacaccatgaccaaatgggatttatcccaggaatgcaaggatagttcaacatattcaaatcaataaatgtgatacatcacataacagaatgaaggaaaaaagccatatgatcacctcaatagatttcaaagcacttgatgaaaataaacatcctttcaagataaaaactctcatcaaactaggcatagaaggaacaaacctcaacaaagtaagggccatatatgacaaacccacagctaatatactgaatgaggaaaagccaaaaggctttcctctaagaattggaacaagacaaacatgcccactttcaccactcctattcagcacagtactggaagtcctagccagattaatcaggcaagataaataaataaaagacatccaaattggaaaggagaaaatcaaactgtccctctttaccaatgatatgctcttatttctaggaaaaactaaagaatccacaaaaaactcttagatctgatgtagccaaaaaaccaataggaaagcaatcctgaacaaaaacaacaaagctgaaggcatcacactacctgacttcaaaatatattacaaggctatgataaccaaaacagtatggtgttggtataaaaccagacacacagaccagtggaacagaatagagaacccagaaatgaatctgtgcatttataaccaactgattttcaacaagggcaccaagaacatgtacaggggaaaggataccctcctgaatacatggtgctaggaatattggatatgcatatgcagaagaatgaaattggaccccaatctaccatatacaaaaatcaactgaaaatggattaaatggattaaaaacttaaatggcagacccaaactataaaactatgaagagaaaacaagggaaatacttcaggacattggtctaggcaaaaattttatggcttagaactcaaaagcataggtaacaaaaacaaaaatacacaaatgggactatattatggtaaaaagcttgtgcatcacaaaggaaacaacagagtaaagaggtaacctgttgaatgggagaaaatttttgcaaactattaatctgacaagggactgatatccagaataaaaaaggaacttacacaacagtaaaacaaaacaaaacaacccaaccaaaaaaaatcctattaaaaagcaggcaaagtacatgaatagacatttctcaaaagaagacataaaaatggccaacgggaatagaaaaaaaaaaaagcccaacattaataatcatcaggaaaatgcaaatcaaaaccagaatgagatatcatcttagcccagttagaatgaccattactaaaaagataaaaaataatagatgctgttgaggatgtagagaacagggaattttttttttttttttttgaggcggagtctcactctgtggcccatgctggagtgcagtggcatgatctcagctcactgcaacctctgtctcccatttcaagcaattctcctgtatcagcctctccagtagctgggactacaggtgcacaccaccacgcctggctaatttttgtaattttagtagagacagggtttcaccactcttacacactcttggtggagatttaaattagtacatctcctgtggaaaagaatgtggaaatttttcaaaaaactaaaaactaccatatgatccagcaataccactactgggtatctactcaaaggaaaaaaaatcagtatattaaagggataccttaaatcccatgtttattgcagccctattcacaatagcaaaatatggaatcaccctgcgtccatcaatagatgaatgaataaatgaaatgtgatagccgggcacagctgctcacacctgtaatcccagcactttgggaggccaaggtgggtggatcacaaggtcgggagttcaagaccagcctgaccaatatgttgaaaccccatctctactaaaaatacaaaacttagccgggcgcagtggcaggtgcctgtaatcccagctactcaggaggctgaggcaggagaatcacttgaacctggggggcagaggttgtaatgagccaccactgtactccagcctgggtaacagagggagactctgtctcataaataaataaataaataaaatgtgatatgtatacataatggaatactatttgaccataaaaaagaatgaaataatgttatttgcagcaatgtagagggaactggaggtcattaagtgaaataagccaggcacagaaagacacatatcacatattctcactcacatttgggagatgtaaaaaaaaagtcactcatggaggtatacagtagaacaataatactagatgctaggaggagtgtttgtgaggggatgaagaaagactgggtacacaacacacagttagaaggaataagctctaatgttcaatagcagagtagagagatcacaattaacaatgtatatttcaaaatagctagaagagaggacttgaaatgttcccaatacacataaatgataaatactcgaggtgatggataccccaaataccctgacttgagcatcccacagtctatgaatgtaagaaaatgtcacatctggctggatgcagtggctcatgcctgtaatcccaacactttgggaggctgagcggggaggatcacttgagcccaggagtttgagaccagcctgggcaacaaaatgagacccccgtttctatttacatttttttaaaaagaaaatatcacatgttccccatgaatatgtataaacattatcaatataaaaatatttaaaaaaattttaaagacacataggctaaaagtgaagggatggaagaaattattctatgcaactggtaaccaaagagagcagggtggctataattatatcagacaaaatagactttatgttgaaactgttattagagacagaaaaggtcattatataataataaaagggtctattcaacaggaagacataaagattgtaaatatatacgcacccaacatcagagcactgaaatacataaaacaaatattgacagagctaaagggagaaattgacagcaatgctatcataggaggaaactttaatgcctcaatttcaataatgaatagagcactcaagcagaaaatcaatttttaaaaacccgacttgtgcactctagcctaatggaccccacaaacatatctataactttccacccagcagaagaagaattagcccatgcaacaaattcttttcaaacacacttggaatatcctccaggacagatcacatgttgggtcacaaaacaagtcttaagaatttaagaagattgaaatcataccaattatctcctcagaccatgtggaatcaaactagaaataataacagcaataaataaggaaaatccacaaacacatagtaactaaacaacacacttttgaacaccagttgggtgaaagaggaaatcaaaaaggaatttaaaaaataccttgagacaaatgaaaacaagaatacaacataccaaaatttatgggatgcagcaaaagcagtcctaagagaaatgtttatagggataaatgtctacatttaaaaagaagaaatatctcaaacaacctaagtttacaactcgaggaagtagaaaaaaaaactaaaagcaaagctagcagaaagaaaaaaaataataaagattagaatggaaataaatggaataggctgggcacagtggctcactcctgtaatcccgacagtttgggaggccgaggtgggcagatcacttgaggtcaggagttcaagaccagcccggccaacatggtgaaaccctgtctttactaaaaatacaaaaattagctggttgtggtggtgggcgactgtaatcccagctactcaggaggctgaggaagaactgcttgaacccaggaggtggaggttgcagtgagccaatctcgccatgcactccagcctcagcgatagagcaagactccatctcaaaaaaaaagaaataaaatagagagcagaaaaaccataaagaaaaatcagcaaaactaacagttgtgtttttgttaaagataagcaaaatcaacaatcccttacgtagactaagaaaaaaaatagagaagactcaaagaaaatcagaaatgaaataggagacattaccttgaatgacaaagaaataaaaatgatcataagtgactattataaacaagtatacatcaacaaattagaaaatatagtacagtggcccccaacctttttggcaccagggactggtttcatggaagacaatttttccacagaccagggtgataaggggacaggggaggatggtttcaggatgaaactgttccacctcagatcatcagattctcataaggagcgggcaacctagatcccttgcatgcagagttcactatagggttcatgctcctgagaatctaatgctgccactgatctgacaggaagtggagctcaggcagtaatgttcgctctcctcctgctgtgcagcccagttcctaacaggccatggactggtactggtccatggcccagggattgtgaacccggatataggagaaatagataaattcctagaaacatacaactttccaagatggaatccggaagaaataaaaagtcttacttctcctgggacccctggaatcatggcatattctgaacaaggggagaaacatattgagcagaggctcttagaggagaaaccacctggaatgactcatgagaagatggcatctggagtagaggctattactggcccaatacagaacactgttcactgggacttcccttacaccagcatccagtatgctcccacccccatgcacccttcggaggtgcatgctcagcaaggggtataagagtaccactggcaaaacaatgcttaatccatctggcagtcatcctggccctgtgttttcctacatcagggctaaaggaggccaaggggtggcagagtgtcagaactgattcattattccaaagtgcacttttgcctcactttcgaggcattgagactttgctgtggacagtcttatactgtctcctcgcagggcatggccttctctgtgccttgtccttgttatgcatcctcctgtatccctcacaaaggaagagatggagctgtttgctaatccactttcttcttgagcagttcatgttgtatgaataatagcaaaacctctaggtcacatgtgacttgtttaaatactgtacatacataccttggtgtgtgtgtatatatatatatacacacacacacacacacacacatatatacatatacatatatatatatatatatatatatataaaatacacacttgtacatgaaactcgtagaattcaaaccacatcccatatgggctctgaatatcctaggtagtgcttggtgcaagagagaagtttgttggcatataattcaccttatcacccctgtctctttgtcataattctgctaaattattgagcctccatcacatccagtttcttatggacattctagtctcactcagaactgactcaaagttcgacacacactttttaaaaattcctcctaattgaaactgtatatcctttgaccaacatctctccaaccaacaccacccctgacaggccctggtaaccacaattctacgctctacttctatgagttcaacttttttagattccacatataagtgagattacacagtatttgtctttctatgcctggcttacttcacttaacataatgttctccaggttcatccttgttgcaaacaacatgatttcctcctttttaaagtctgaatactattccattatatatatgccatttcctttctccactcatcctttgatgaacacttagattgcttccacatcttgactattgtgaatagcgctgcattaaacatgggagcatagatatctcttaaacatattgattttatttcctttggatattgatatagtttaaatgtgtgtccctgcccaaatctcatattgaaatgtaatccccaatgttggaggtggggcctggtgggaggtgattggatcatgagggtggagtcctcatgaatgatttagcaccatccctcttagtaccatcctcccaatagtgagttctcatgagatctggttgtttaaaagtgtatagcacctccccctcactctcttgctcccgcttttgacatatgacatgcctactccccctctgccttccactatgactggaaacttcctgaggcctccccagaagcaggtgccattatacttcctgtacagcctgcagaactgtgagccaattaaacctctttacttagaaattgcctagtctcaggtatttctttatagcaattcgagaatggactaacagaaaattggtaccgagaagttgggcattgctgtaaagatgcctgaaaatgtggaagcagctttggaattggataacaggcaaaggttggaagagagttgagtgctcagaagataggaagatgaaggaaagtttggagcttcttagagactggttaaatggttgtgactaaaatgctgatagtgataacggacaatgaagtccaggctgccaaggtctcagatagaaattaggaacttattgggaactggagaaaaggtcccttttgctatgccttagcaaagagcttggctgcattgtgtccacaccctagggatctacggaagtttgaacttgagagtgatgacctagggtatctggcagaagaaatgcctaaataacaaagcattcaagatatggcctggctgcttgtaaccacctatgctaagatgtgggagcaaagaaatgacttaaagctggaacttatatgtaaaaggtaagcagagtgtaaaagtttggaaactttgcactggccatgtggtagaaaagaaaagttcattttcagaagaattcaagaaagtttctgagcaaccatttgctagagaaatttgcctaactaaaaatgaggcaagtgcagatagccaagaaatgggaaacaggcctctaaggcatttcagagatctaagaggcagcccctcccatcacaagccccgaggcctaggaggacagaatggtttcatgggccagaattgacctgtgcagcctcaggacatgtctccctgcatcctggcttctccaactccagctgtgacttaaaagggcccaggtacagctcagactgcagctccaaaggttgcaagccataagtcttggtggtttccacatggtcttaagcctgcaggtgcacagagtgtgaataaggcttgggagcctccatctagatttcagaggatatgtggaaaagccaaggtgtccaggcagaagcctgctgcaggggctaagccttgacagaaaacctctactagagcagtgcaaaaaggaaatgtggggttggaaccctcacacagagtacacactggggcactgactagtggagctatgagaagagggccaccatcttccagatcccagaatggtagatcagagcagcctctgagcctgaacccggcaaagccacaggggaagaaatacccaaggctggaagcccacctcttaaattggtgtgccctggacatgggacatggaatcaaagattattctggagctttaagatgtaatgattgccctactgggttctgatcttgcatagggcctgtagcctctttcttttagccaatttctcccttttggaacaggaatgtctatctaatgcttgtacccccattttatcttggaagtaactaacttgtttttgatcttacaggctcataggaggaaagaacttgccttgtctcagatgagacttcagactttggacttttgagttaatgctggaattagttaagactctgggggactgctgggaaggcaagattgtattttgaaatgtgagaaggccaggagatttgagaggggccagaggcagaatgacattgtttagatgtgtatcccaacccaaatctcatactgaaatgtaatccccaatataagaagtggggactggtgggaggtgattggatcatgggcgcagattcctcatgaatggcttagcagccctttgtttccatcctcataatagtgagttcttatgagatctggacatttaaacgtgtgtaccatctccctcctcactctcttgctcctgctttcaccatgtgatgtgcctgctcccattttgccttccaccatgattggaaacttcctgaggcctgctcaaaagcagatgccactatgcttcccgtacagcctgcagaactgtgagccaattcaacatcttttcttataagttaccgagtctcgggttttctttatagcaatgcaagaatggactgatacggatatatacagatatatacagatatatatagtgggatgactgggtcatatagtggttatatttttaatttgagaaaactccggatattttctatgtttgtactaatttacatttccacaaatagtgtacaagtgttcccttatatccataccctcaccaacccttgtcgtcttttgtctctttgattacagctattctaacactgtgaggtggtatctcagtgtggttttaatttgcatttctctgatgattagtaatgttgagcattttttcatatggacactttttttttttttttttaaagatggagtctcactctgtcacccaggctggagtgcagtggcgcgatctaggctcactgcaaccttcgcctcctgggttcaagcaattctcctgcctcagcctcctgagtggctgggattacaggacccaccacgcaccaccacacccagctaatttttgtatttttttagtagagacagggtttcaccacgttggtcaggctggtctcaaactcctgacctcacgatccgcccacctcggcctcccaaagtgctgggattataggcataagccaccgtgcccagccttatattgacacatttttaagggatttgggggggggcaggggttctttgcaacaatgtaaacatccagtccctcatcaaactttcaattttttttcacgtactaatttatatcagtttggaattatgattccctctgttatttaatgggttttaatctataactagcattatttattttgatgctcaaaccatgtcaagtttggtcagtggaagtcccttcaatctggtttccatgtcctttgaacacgtccccaccattctttgagcactgccttactttcaagcacaagatgttccaagttcattctgaactttcccttccccagctctggaatctgccatttctccatggagccttgctcctttcagtggagcatggtatttaggaaccaagggctgactgcctaatgtgctttccaagtataatttcctcagtccaagcttttcaaattgatctgccaaagacccattgccaaagatccattgccagaatataagagtggaaggaaattcttaatattttttgaaagttactattattttcatttttctctttgtaaaaaattcatttaattcaatataaaaagacaaaaatctttggcacataaatcgcaactctctgatgcaaatgtttaaataaagctgatactccaagaagacgcaacatattctctttatcccacagacatataggcctatggttgcaaacttttatacacacacagagtcacaattccactggcacccgtgatgttccacatccagattttccaaatcacacattctcatcttcacatagccttgccggcaaccacacggcatagtaccacattgttacgtcaagcacagccagtctaccacagagcctgtcgtcccattgaccaaagtcacaaaaatcacagccccgggtatttactgtggttttctccagtcagatcccttcactcactacacactgactcacactcaaattacacacacgcggaaacacaacccgccagagccagagaggttccgtcggtcccgcaaccctcacagtgccacacacacgcgctcacaaggcaaatacaaatggccaggcactcattctttacaatacacatattaagcgcctattatgtactacacgccgggactacctcaagaggtgaaacaaacaaaatcctgcctggcggagctatcgcccagtcccgcacgcactcggcctcagggtcacactcggcggtcccacgctcaagtggcccggccagtggcccagaggcgtctgttctcctcctcagcttcctgcgtgggttcctggtaagtgagtcgaacccgccggatgcgcgcgcgcctgcgcctccgcccaaaaggatcagtttccggctgtggactacatttcccagaagccccttgggcagtgttgcctggaccccaagggccctttacattgcgttcttaacggttcagtcaccttaaccgttattattcacttgcgggcgagaagtccgagctaggtgaggcggaacgggactcttacgagtaggactggggatagaactgccgcccaaagtgaggcgctccagggcccagacctggcgtgtcgtgcccgcagggagcctcaggcctgtgcgtgcttggggagcggagaagggaaattgtgtgacaaaatgtggcagacggtgtatgtgtgtgtgtgcgcgcgacggggcgcctgtcaggaccgggttgggcgggtgtgggtgcgggtgtgaggctgagacaggtgcctggctctctggtgtgtgtcactgaccctctaccctcctcacggcctcggtgtttgcacacagcagtgtccccaagagggaagtcaaatatcgagctctgggatgaaggttcccagcaagaaggtacagacctgggttggcgattggacttttgaattagaagtgtccctaaaacagactcctgggacgacaggttggaagactgcgcagttggagccgctgtgtgggcagctgcatgtttcagaaccactgcattcccatacctttgatctagaaacctggtgtgagttcagagacagatcccagcctcactctcacacagctgttatgtgcgtgaggtcagcacagatgtggcgctggaggggatattctaggtcggtctgtgctcttaagaaaggcctgctgtctcatgattatttttcttcccccattctgctattcatcaaaacagggatcctgaaaaggagggaacaattgttgtagcaggtctaaaagttcaggtccaggtaagtttatatttcctttttattcataaaatggaaatcacacattctaatcctcacacagccttgcctgcacccagtcatacggcgtggtaccacactgctatgtcaagcacagccacaatctaccacagagcctgtcacctcattgctcacagtcacaaaaatcacatccccaggtactttctgtagctttcatttgcatttttccctttgaagaagttcatttgattcaatctaaaaagactaaattatttgtcacataaattgcaactctctggtctatatctttaagtaaatctttaaataaatgcataaaatgtttttgtttttaggaaatggaaacattgctttgcttttcctgaattgtccagtgacctatcccaggccttcctttccagtgaacaatggaccatgcaggtggaccctcctcttcacgggcctccaaatgactttctcatttttcaaatcattcctctgcactcactttctataatggtagagaaatgcatatcctggagtctaaagttaaaactttgttttattgagattaatgtttaggtagaatcacatcatccatcttctccaatcttctccaaagacctcagttttaaaatatgacaggattagagatgacctgactagtgtcagtaagcaagtgataatggtcgcctgcttttaaggcttttagaagtgggaatgtgattggaagtccaagcatagaaatctgtgtgaacatgagcagggatttttttccaaggaatccatgagttgagatttatttttatacagagttagtcataagaataaaaagtacatatgagtaaagtaatagtcatagtgatgaagaataatacgcaatttttttttctttttttgagaaggagtctcgctgtgtcacccaggctggagtgcaatggcatgaactcggcttactgcagcctctgcctcctgggttcaagtgattctcctgcctcagcctcccaggtagctgggattacaggcgcctgccaccatgcctggctaatttttgtatttttagtcgagacagggtttcaccacgttggccacgctggtctggaactcctgacctcaggtgattcacttgccttggcctcccaaagtgctgggattacaggcatgaaccaccgcacccagccgcaaattttaaattttatatgaatctcactaatattaggatttaaagacatttaacaagcattatatctaaattaacatttcaactgattatttgctggagaagtagaggagaaccaaacactcttctgtctgctttgttcaaattttcttattcagtctgcagacactgttcacctggcttgtgtattaagagaagaatcttaacagtgaaaaggtcttgttgaattgaagaagaatgttcaagaactggcaggcatttatttataatggtcatgctgttttcctattgtttgcatacatgtcaaaccaatttgcttctgatgtgttaaaacattttattttataattggatatagatctattgtatacttctggttatagaattaatattcaccttttataaattatttagttactcattatattacataaggcacttataaagaagaaagttaaaatagccccagcatcactattaacactttggggagctatattttagcaagatttttttttttttttgacagagtctcgttctgttgcccaggctggagtgcagtgatgtgatcttggcttactgcaacctccatctcccaggttcaagaaattctcctgcctcagcctcccgagtagctgggattacaggcgcctgctaccacgcccagctaattttttgtatttttaatagagatggggtttcgccatgttggccaagctggtctcaaactcctgacctcaggtgatccacccacctcggcctcccaaagtgctgggattacaggtgtgagccaccatgcccgacctatttcagcaagatttttcagcacacttgtatgtatgtgtgtgtgtatgtgtgtgcgcacagcacctgcacttttcttcctgcagaatagaaattgcactaactgattattcaaaggacacaagactttccagcttctagttagaaaaactaattctccctaaccatagctttcttataactctgtgcacatagggagaagaggaaaacaccaatgaatcctgctaagtttgattaacctttgagaaatttacaccttttagggttatataaaccaatcaaggataattaatatgacataatttatcaagtaagatagttcttcaggattatactctttttttagatttttaaggttgcttttacaggacatagcaatactcttatcttggttaggtttttttcagggttccattatgcaaataacattttctaggacagatttataacagtagaaaacagaataagggtgggcatggtggctcaagcctgtaatcccagcactttgggaggcccaggcaggtggatcacgaggtcaggagttcaagaccagcctggacaagatggtggaaccccatctctactaaaaatacgaaaattagccggctgtggtggcatgcgcttgtaatcccagctgcttgggaggctgaggcagagaattgcttgaacccaggaggttgcagtgagccgagatagcaccactgccctccaggctgggcgacagagtgagactctgtctcaaaaaaaaaaaaaaaaaagaaaaagaaaaagaaaacagaataagatagtaacagctacaaatattcatgtaaatctttccatatagaacaggagaacaagattgaacctcatattaaaattatctattgaatgccttattacagcagttcccaacctttttggcaccaggactggtttcatggaggaccgttttttcacagacagggagagggagatggtttcaggatgattcaagcacattacatttattgtgcattttattcccattattattacattataacacgtaattaaataattatacaactcaccctaatgtggaatcagtgggagacctgagcttgttttcctgcaactagatggtctcatcttggggtgatgggaggcaatgacagatcatcaggcattagattctcataaggagcacgcagcctagatccctcacatggtcagttcataatagggttcgcactcctatgaaaatctaatgctgcagctgatctgacaggaggcagagatcaagcggttaatgctagcaatggggagtagctgtaaatacagatgaagcttcccttgctggcctgctgctcaccttctgctgtgtggcacagttcctaacaggccgtggtccagtgtcagtcagtgacctgggggttggggacccctgccttaattagattattttagctagttttatgttgaagaatgatgtcccccctttggtagttgcaagaacaaaagaggatatttcttttttttttttttaaatgaagtctcactctgttgccctggctggagtgctgtggctcaatctcagctcattgcaacctctgcctcccaggttcaagtaattcttctgcccagcctccagagtagctgggattacaggtacccactaccacacctggctaatttttgtatttttagtagagacggggtttcaccatgttggtcaggctggtcttgaactcctgacctcaggtgatccacccacctcagcctcccaaagtgctgggattacaagtgtgagccaccgcgctctaccaagaagagatttcttgattatctttctgggagtctgttttacgaatgttgttaattaaaaataattgcatcttcaaggctcagctctgaaatacttaaaatatcattattaaaaaatgggcatgagactcaaactttactagaaaaaatgaaataatataaaatgattttatttaatagcagtggaacaaaggacataatatcctctattttaataatactggctaacttttattacgtaattatgtatcattaagtgggatgtatgtattatctcaatcttcgtgacaaccctatgagataggtgctgtttttatccctaatttaccaacaaactaactgaaaagtatgtagctgtcagactaagattcacattctgaaaatctgacaacagagtttgtgttattaatgacaacgttataaccctgcccataatggcatatgctcctttaatttgcctgtatcagtcagtaactcatcattgatgtcttcctccaaaaataaatatggaccaatatagttagtattagtaaggccttagtgtgccatcataactgaccatagtttatttaacctgctgcctactatagctattagtatttttaatatttgattattataagttgttatatgataaatgtcttatgtatatgtcttaatatgctttaatagccacttgcaagaaaaaaatgccaaaaattggaattttagtcaaatatcagacataagggctcacagtatactgaatcttgtgttagtaatcagaggaatacaagaactgaaaacacataggtgttactgtacagcagagagtctaaaatcagaatagactgaataagtataaggtagaagataataaaaaacagtaaagaaattcaggtcacaggccttgggagttcataggaaggagatgtccagtgctgtccaatagaactttccatgatgatggatttgttctatgttttccagtgtggtagctgctcaccacatgtggctaataagcacctgaaatatggctagtgtgactgggaaactaacttttttttttttttttgtcgagatagagtctcactctgtcgcccaggctggagtacagtggcgagatctcagctcacagcagcctctgcctcccgggtggaagcgattttcctgcctcagcttcctgattagctgggaccacaggcatcagccaccatgcccagctaatttttgtatttttagtagagacaggggttcactatattggccaggctggtctcaaactcctgacctcaaaagatccgcccaccttggcctcccaaagtcctgggattgcaggcgtgagccgccgtgcccggcctgaacttttaattttatttaaaatttgatttaacttttttttttttttttttttgagacagagtctcgctctgtcgcccaggctggagtgcagtggtgcaatctcggctcactgcaagctctgcctcccaggttcacaccattctcctacctcagcctcccgagtagctgggactacaggcgcctgccaccacgcctggctaattttttttgtatttttagtagagacggggtttcacgttgttagccaggatgatcttgatctactgacctcgtgatctgcctgcctcggcctcccaaagtgctgggattacaggcgtgagccaccgtgcccagcttaaaatttgatttaaataaccatatttgtattgaacagcacaatttcataccttaagtttttattgtaatgattcaaagtgaggctaatgggtttttattgttagattcaaaaacaaagtttttattgttagattcaaagtgaggctaatgggacaagattattcagcagcagtttggaggatattgtggctgaaaggaaaatttcagagcacaaactgtcaatacgtttgtcaggagtacatgaaaagccacttcactgtgaccagcattcatatgtataagacattgcaatatattagcatacatggacatatgtgaaaaatcaaaagaattgcttccaatgttatgagctaaagggaaaaaagacattcagtaaaaatataacagctgttggccaggcacagtggctcatgcctgcaataccagcactttgggaggctgaagagggcagatcacctgaggtcaggagttcgaaaccagcctggccaacatggcgaaaccctgtctctactaaaaataccaaaattagccgggcgcagtggtgggcgcctgtaatcccagcgactcgggagcctgaggcaggagaatcacttgaacctaggaggcggagtctacagtgagctgagattgtgtcattacactccagcctgggtgacagagtgagactctatctcaaaaaaatatatatatataaatatataaatatatttatatgtatttatatataatatataaatatatatataactatattaatatataaatatatattatatatataactatattaatatatatatatatcagctgtttttagattatcttaagcttttccttcaagttgaagagaagatcgttcaacaaaggaaaggctttctcttatcaaaatgaaaaataagtacatatgtatgccggtgtgtatattttaaatttttattttatttttttgagatgagtctcactcccgtcgcacaggctggactacagtggcacagtctcggctcactgcaacctccacctcctgggttcaagtgattctccttcctcagcctcccaagtagctgggattacaggcatgtgccaccacacccagctaatttttgtattttttagtggagatggggttttgccatgttcgccaggctggtctcgcactcctaacctcaggtgatccagccacctcggcctcccagcgtgctaggattacaggcgtgagccaccgtgcccagcctaaattaatttttaaagttacagattatactttaaaaatatatcaagtaatgtcatgcagcttggcagtgctgacatatagatatatacatttttaaacttttttctctctctcagtttctgcctgtccttcgttctttctttatgtatgtgtgtgtgtgtgtatgttttcacaaatgtaattatattgtacattctgggttttaaccttattttttaatttagaacatatcttggatatttcccaaatcctttaaatattttctccaatttagtatagtatttaatatctacttaatattctgtttcatagatgatctgtaacttatctaaccagtcagctattgctggactcagaatgctgaattctacctccctgcatgcatcttttttatttttgctttttccagtaagccttttgcacccctaacctgcatgcatctttttttttttttttttttttttttttgagacagagtcttgctctgtcgcccaggttggagtgcagtggcgcgatttcagctcactgcaacctctgcctcccgggttcaagcgattctcctgccttaggctcctaagcagctgggattacaggcatgtgccaccatgcctagctaattttttttgtatttttagtagagatggtttcaccatgttggccaggctggtttcgaactcctgacctcaaatgatctgcccgccttggtctctcaaagtgctaggattacaggtgtgagccaccgcgcccggcctaacctgcatgcatcttaatacacatcatttgctttgggtagagtcccaaaattaggtttggatggtaaaagtctctcacatccttctacatgccatgttttaaggtcctacaaatctgtagcatttacacagtattcatttccctgtgatgttgctcatctggcatattattaatcttttaagtctgccattctaataattgtcaactggtatttccttaattaggatctgcttcattgtattgaaatttaataagttcggtggatgatatgctgctatttttagtgaattgctcatgcttaagtttcatttgaaaacattctgggcttcagaggcaaaagccagagttgagagcaagaccctgtctccaaaaaaaaaaaaaagatagtttgctttataattagagaaatgtggattcagaacacagctctgcctcttactaactgtgaatttgggcaagttacattattttaagccctcattacctcatctgttggatggagataaatgcattgcatggttaaatgttaatatgataaaggacccatcatgcagaagatcctaaaaatagctacttttgttgtcatcacctggcaaccgtgggcatgaatttacaccaccccagccttgatattgagatatcttccccagtttatatgcgcagaatggtggggttggaagtagaaatgatggcataacaggatcttattaacttaagtcattttaggagttttgacacacatctggtctcagagtcacttgttcttccccccagccccggtttctctggattctgtgcttctccatggaggaaactcaaggagaactgacaagttcttgtggttctaaaaccatggccaatgtaagtttgtgtttttcttccttgaaatactgtgtttttaaattcatgtgatcattgaagtctcgttatcttgagacttccttcctaagacaaccctgttgtggaacctgctccctagttactccctagttacagtgaaggatagtgccaaatagcctagtgtcttcctcatttgctcctgttttctcttatctgtgctcaaacattgtcttccatgtcagcctcagaggcagaggtcagatcccatgcattgagaggcttagaggactaggctggagtatgattggggcctgcatatggtagtttcaggcatctagccagggaatttccaagggatgaataagaaaacaaaagtcaattttgtggttgaggaggttgtgctggtctccagtgacatcagtgtcattgtggatacgtcagcatcctctggcttaggaacaaagcaagtattcctgaggtatggcaggggtagcaggtaggaagatcctccaatccctaatgatggctggaaataggctctgatccctaatgatgggtggaaacagaactggggaagaccttaaacattttggccaacctaaatgcctaagaataaaagaagaattagtctgctgtatctttaagatggatgatattattagctagccaataaatatactaactgaagacttttcttatgaggttattttgcatcatgatgaaccagagttttaacgaaatcacgtaatgtcagtcaaatcctgttttctaagagagattttagagtactttttggtgaaaaaattctttttccaaaaattttttgaagggaagagaggatgatggaacttgcatttattcagaactttaactgcaggcacataatgggcaatgtgcttatttatgctatttcacttaatttgcatcaacaatattctttaaaagcgtatgaacactttatttcagaaatattaatttctttattcttttacacacattgcaggcttgagccccagtttatttgcttactatgttgcttctttcctgcaaagcagttttccatcttgaaaatacatttaatttttttttaatacataggcttgtcatttcaggtatctttggcatttagggatgtgtccatagacctctcccaagaggagtgggagtgcctggacgctgtgcagagggacttgtacaaggatgtgatgttggagaactacagcaacctggtctcactgggtaaggtatctttcgaaatcgtttacaatctgttttctggagtatcagctttctccactgtcaaactttagaactctgttttaagaggctgactgacacccctatttctaaagtcatagtttcagcagtgttggggtggaaatgggcacctgtgttaagcaacttcacctttctgaccctcagtgacattcactcctccctctgacttttcctgtcattgcttgcttttctaaataatttccaggtttgagttgtgtgacatcagatttcatataatgcatatactcagaattcctatagctgttctgtgttaatatctgaccttcctacaagacaacagctagtctcagaattctagttttccttgattatcaaaagaacctccatggattatacagtggtggattgagttaacaatagtcatttaaaactcaagccaacacaccccatcctaaaggagacatattctccttaacctgctttgcggttgaaagttaaagtctgtgaattgacattttctgttgaaggaatatctgaggaagaacctggaaatattttaggaaacttagtatatttctcctaggaaaatagtaccaacaacaaaataatactatatactgggcatattatatgcctttgcatatattaattcatttaattctcaccacagccctaagaagtcggtaatatcagccccattttgcatttgataaaagtgaatatgtgcagggtaactttgaaggtcacacagctggtaggtggcagaagatttgaacccaggccatagggctccagagggtgtgctcactggtcccctttctatactgccgttaacagcaaagcagaccttttcgctctctcaccttgtctctttagtcctgtaattgtgagtccatgttaacgtgaatattcttagatggcctttttcttctttactgtcatggcattgtctagtaccattttcacctgcagtttcttacaaatgtaaccaagtctgaattgtcatttcaaggttatggttgtttttgtttttttctataacatgtgtcatttcttttctcatgagcaggatataccattcctaagccagatgtgattactttattggagcaagagaaagagccctggatagtaatgagggaagggacaaggaattggttcacaggtgagtgacagcaaattaggcgggagggtgctatcacaagttatgacccatgatgtcagggaggaggcacagcactgagttgtttggaaagctcccttcaaaggcctgaggcctgtggaaaaaggactgatacctgggaagcattcagattctctctacattagctaccaaaggaactttacccaatttgccatactccttgtttctcttctctcgtatttctctcctctttcaaagtggggctgctttctttcttccccattgatgaccattttacgtgtgtttccaggcctcctttaacattttgatttatattcatttctccattgtccaagttttattcatcaaatatttcccatttacctaacctaagccaggcactgtgctagagtttaggcactactgatagacactcttgtcacagagatgttgatattatagtaagggaaacatgttgtcaatacgtaaacagataataatcaagttttcatatgtgttgtgaagaaagttaagtagagtaaggagctagagtgttggggagttagtagggctaatttagataagatcaggaaaaggccattttgaggtgatgatatttgaaccagagacataaagtaaggtctcaggccatgtgagtattgaggaagaacattacaagcagaaaaagctgcaagtgcaaaggttctgagatgaagaaccatctgtgtttattcccaaagtaaattatgccacctgatgtgaacattcttgtacaattgtttttgtgttcagatgttttcatttctcttgggttttcatttttcttgggaatatatggaagtggaatttctgggtcataggacaagtgtattttcttaatcatatttattgaggtataatttatatagtataaaatgtactcattttaagtgtcaatttttataacattttaaaacagttttattgacatataattagcatacaataaactgcacacatttaaagtataaaatttgctaagttgccctgtatattgtgaaaccatttcaaaatcaaaataataaacatatccatcacctccaaaagaaatccctccctcatgtccctctctacccactgcccaggtaagcactgatcatctctctgtcactataacttagttttcattttctagaattttgtataatggaattatatggtgatttttttcttccttttttaaaaatatggtgatttttaaaatttagcttcattcactcagcaaaattattttgagattcatccatgttgctatatgtatcagtacttcatttcttttcattgttgagtagtattccattgtatggatgtaccacaatttacttatccatttatgtataaggatggacattgagttatttccagtgtttggctattacagataaagctactggaaactttcatgtaaaattcttggtatagacttatgctttcatttatcttgggtaactgtctggggtagaatgggtagatcatatgataaatatatgtctattttttaagaaactgccacactgtgtttgaaagtggttgtatcagccagtagcagtggcttatgcctgtaatcccagcactttgggaggccgagacaggtggatcactggaggtcaggagttcaagaccagcctggccaacaaggtgaaacttcatctttactaaaaatacaaaaattagccaggcatagtgacaggcatctgtaatcccagctacttgggaggctgaggcaggagaatcacttgaaccctggaggcagaggttgcagtgagccgagattgtgccactgcactccagcctgggtgacagaccaagataatgtctgaaaaaaaaaaaaaaagaagaagaaagtggttgtatctttttactttcccagcagaagtttatgaaaattccagttcttcgacattcttgttagcactttggtatggtcagtcttttaaattttagctttgctaataggtgagtaatggtatctcactgtggttttaattttcattttcctaatgcctaataatcctgagcaactttttattcttaatttatcatccatatatcttctttggtgaagcatctattacagtcttctgctcattctctttgcttctttctttcttttttttgaaacagagtcttgctctgttgcccaggctggaatgcagtggtgcgacctcggctcactgcaacctccgcctcctgggtacaagcaattctcctgccttagcctcctgagtagctgggaccacaggcatgtgccaccatgcccagctaatttttgtatttttagtagagatggggtttcaccacattggccaggctggtctcgaactcctgacctcagatccacctgcctcagcctcccaaagtgctgggcttacaggcgtgagccactatacctggccttctgcccattttctaattgcattggttgtttgctaattattgggttttgagagtcccttatatattctggatgtaagtcctttatcaaatgtatgatctgtaaactcttaacagtgtcttctgaatagcataagctcttaatttgattaagttaatttatcacatttttctcttatggattgtcctttcagtcatatttaagaaatctttgcccaatataaaaagtacaaaaattttctgttttcttctaattttttttttttttgacagagtctcgctctgtcacccaggctggagtgcagtggcacaatctcggctcactgcaacctccacctcccgggttcaagcaattcttctgcctcagcctcccgagtagctaggactacaggtacacgccaccacacccagctaatttttgtatttttagtagagacagggtttcaccatattggccaggctggtctcaaactcctgacctcatgatctgcccaccttagcttttcaaagtgctgggattacaggcgtgagccactgcccccagcttttctagaaattttatggttttagatttttacatttgtatacctattgtacacaaactcttccagaaactttaagataagggaatacttccaaactcactcttcaagtccagcattaccctgataccaaaaccagacaaaggcattataagaaaagaaatctataagtcagtatctttcatgtacacaaatgcaaaaattctagactaagttttagccatttgaatccaacaatttatgaaaagaatagtagttactggccattcttggcattccttggcttgcagacgcatcactgcagtctctgcctccatcttcatggcaccctctcttgatctccctatgcctcgctcttataagtacacctgttattggatttagggcccaccctttttccatattaggtcacattcacaggcactgggagttaggaacatgtcttttctgggggccacaattcaacctactacatctgagaataaaggcgtttatttttctcctttctaaagcctgtgttcttcaccttgccttactctactagccaggacctgcagtgtaattcttgactagcaatgagtttgaggatctgtgaatgagtaatgataaaacaactgatgctcaccaaataaaatatctcagtacttgagttgggacagagacaaagagaaggaacagtagccacacacacagggcaaatgtaaacagttttggagatgcctaatgttcaaggtaacaataggtaattggaaaatgatgaaatacaaaaatgacttttccatttatacttttgattgagcaattttggatgtatctttgttccctttcagaagggaagtgatccaggaaagagcatatttaattgctgtactaggatgagattggaatcagggagatatattcataactatgttgtaatttggggaaattaagttattatacttagctgccctctcagtgacttgtttgtaatatttacagaggtggtttgcagaggtcttccaaataagaaaggggtttttatcaatggtaatatgtttgggttttattctagggggaacgagaaactctattctaaagggaaaagaattaggtacagattttcaaaatgatctccatcaaagccatttgatgaaaaagattttaaatgcacatatccaggacttgctcctatagattttgattttgtctggtttggtgcctgaagaacagtatatgtaagaaatttccctaaatccatcctaaataagcggatcactgatttaccctattatcctattcacctattttaccattctttttttttttttttgagacagagtctcgctttgtcacccagcctggagtgcagtggcacaatcttggctcactgcaagctccacctcctgggttcacgccattctcctgcctcagcctcccgagtagctgggactacaggcacccgccaccacgcctggctaattttttgtatttttagtagagacggggtttcaccatgttagccgggatggtctcgatctcctgacttcatgatccacctgcctcagcctcccaaagtgctgggattacaggcacgagccaccgcacccggcctattttacaattcttaaaagtcacatcattttctgaggtattttgccttcttttaaattgcactacaataatttagagttctctaagccaggaaccagcaaactatagcccatgagccaaatagctcactgcctgtttttgcatggctcttaagttacaactgttttttccatttttttaatggttgaaaaaatcaagattttgtttcatgtaaacactttttgaaatttaaatttcagtgtccataagtcaagtgttattataacacagccacacttattatcatctgtggctacttttgtgctgtaataacagagctaagtaattgtgacagagaccatatgcctcccaaggcctaacaccttcactatctggtcttttaaagaagaagtttgttgaatcctgctctaaaccatttatttctaatgtatgttatttctgtttatcttttatttctactatgaggtacaacccccatccctgccccaacacagaaaaatagcattatagcatttgtttactctttgcttttttttttttttttttttgcagatttggaatacaagtatattaccaagaatttgctttcagaaaagaatgtttgcaaaatctatttatctcaattgcagacaggggaaaaaagtaaaaacaccatccatgaggacaccattttcagaaatggtttgcagtgtaaacatgaatttgagagacaagagagacatcagatgggatgcgttagtcaaatgctaatccaaaaacaaatatctcatcctctacatccaaaaattcatgctagagagaaatcatatgaatgtaaggaatgtagaaaggcctttagacaacagtcataccttattcaacatctgagaattcacactggtgagagaccctataaatgtatggaatgtggaaaggccttttgtcgagtgggagaccttagagtacatcacacaatccatgctggggagagaccctatgaatgtaaagaatgtgggaaggcctttagacttcattatcaccttactgaacatcagagaatacattctggtgtgaaaccctacgagtgtaaggaatgtgggaaagcctttagtcgtgttagagaccttagagtacatcagacaattcatgctggagagagaccttatgaatgtaaagaatgtgggaaggcctttagacttcattatcaactaactgaacatcaaagaattcatactggtgagaggccttatgaatgtaaggtttgtggcaagacctttagggtacaacgacatattagtcaacatcagaaaattcatactggtgtcaaaccctataaatgtaatgaatgtgggaaggcctttagtcatggctcataccttgttcaacatcagaaaattcatactggtgaaaaaccctacgaatgtaaagaatgtggtaagtcctttagttttcatgcagaacttgctcgacatcgtagaattcatactggtgagaaaccctatgaatgtagagaatgtggaaaagcctttcgtcttcaaacggaacttactcggcatcatagaactcatactggtgagaaaccctatgaatgtaaggaatgtgggaaggcctttatttgtggttatcaacttactttacatctgagaactcacaccggtgagattccctatgaatgtaaggaatgtggaaaaaccttcagtagtcgctatcatctcactcaacactacagaattcatactggtgagaaaccctacatatgtaacgaatgtggaaaagcctttcgtcttcaaggagaacttacccgacatcacagaattcatacatgtgagaaaccctatgaatgtaaggaatgtgggaaggcttttattcatagcaatcaatttatttcacaccagcgaattcacaccagtgagagcacctacatatgtaaagaatgtgggaagatttttagtcgtcgctataatcttactcaacattttaaaattcatactggtgaaaaaccctacatatgtaatgaatgtgggaaagcctttcgatttcaaacagaacttactcagcatcacagaattcatactggtgaaaaaccctataaatgtacagaatgtgggaaggcctttattcgtagcactcatctcacgcaacatcacagaattcatactggtgagaaaccctacgaatgtacggaatgtgggaagacgtttagtcggcactatcatcttactcaacatcacagaggccatactggtgagaagccctacatatgtaatgaatgtgggaatgcttttatttgcagttatcgacttacattacatcaaagaattcacactggtgagcttccatatgaatgtaaggaatgtggaaagacctttagtcgtcggtatcatcttactcaacattttagacttcatactggtgagaaaccttatagctgtaaagaatgtgggaatgcctttcgtcttcaagcagaacttactcgacatcacatagttcacacgggtgagaaaccctataaatgtaaagaatgtgggaaagccttcagtgttaattcagaacttactcgacatcacagaattcatactggtgaaaaaccctatcaatgtaaagaatgtggaaaagcctttattcgtagtgatcaacttactttacatcagagaaatcatattagtgaggaagtcctatgcataatgtaaagagaatacgatggcctttagaaaatgccctttagcagagaatttgtaatttaagaaattttctgtttgttacggaacatgtgggaatcccttttacttcatgctcacaatttatcagaaattatttcgtatgttaaagagtcgaaagactatagcatcactcagtccctgttagactttagaagattgatactgatgcactgcatcccaaaccatcaagggccttttcccctacaaactgttgttgaacagtgcttctctaaaatgcaataataatgggccaggtgaagtggctcacacctgtaatcccagcactgtggaaagacaggagttcgaaaccagcctgggcaacatagtgagaccctgcctcatggctttagtgagccatgattgtgccactgcactccagcttggtgacagagtgagatcctgtctctaaataaataaataaaatgcgggccaggcacagtggctcacacctgtaatcccagcactatgggaggcccaggtgagcagatcacctgaggtcaggagttcaagaccagcctggccaacatggtgaaaccccttctctactaaaatacacaaattagctaggcattgtggggggtgcctgtaatcccagctactcaggaggctgaggcaggaaaattgcatgaacctaagtggcagaggttgcagtgagctgagatcgcaccactgcactctagcttgggcaacagagcaagactctgtctcttaaataaataaataaatagattaccagaaaaatgaaaagaaaaaaacagacatacaaaataaaagccccagttttttattatggtatttaactgagttaactctgtcagattgctgcaaacatttctaaatacttgctcttggtatctataacttttgcagagaccagaagcaaacaatttgtgggccagtgtcaacacatggaccacactttatatagcactgtaacggaaaatgattctgttaatgtaatgaacatgggaaagaccagccttggcctatctttatgatatatataaataatataattctcataattccacctctgcctatgtggtgtttggcaaaacatgcccctgtgccttggtttttaaaatggtaataacagtaccacctaatagtatttttgtgaggatgaaatgctaataaaagataaaacctttaaaagagtatttggcacacagcattttatcaataaatattgctttatttttttcattggggatacatttagtacattcatgtgagaggaaggccctgtgggtgtaagaaatttgtaaaaactgtccattacctttcactccttatttagattggaataattaactggagataatatccagtaaaatagattaaacttccatttataaagtcagaacctatctctgaaaattaatgtgagaaagaaatctctagatttgatgggtgtgaagattatgagagtaaagttttgaagactcagggatagctgtaatgcttttttctttttataacccaaaaagcaggtatgtcagtcgctttttctgcccacaatgataaattaaaaacagccactatccatttggaaaacttaaaagaataatgaacagttatgttctatctagattcagcaattgttaatatgttgtcacatttggtttgcttatacataatatttacatattttgctgtagtatttgagtataaattgcagatactataacacatcacatctaagaataaaggctgcctcctacttaattgctatataacaattgtccaacctgtctgtgccccagggcagctttgaatgcagtccaacagaaatttgtaagctgtcttaaaacatgagattttttttgtgattttttttaagctcatccgccattgttagcacattttatgtgtagcccaagataattcttcttccagtgtaacccagggaagccaaaagatttgacccccagtaacttcacacctaaggagattagcaataattccataatctgtaatattcagtctgtgttcatattctcagttgtgttcattcttttcatttgtgtaaacaatgcttttcataggttatttttaaattcaggaaccaaattcatgaattacatttgtgcattgttcgtctcttttaaagtaagaatggcccttccccccacaactttattgcaacattgactttttttttttttttttttttttttttttgagatggagtctctgtcgcccaggctggagtgcagtggtgcgatcttggctcactgcaagctccgcctcccgggttcaggcaattctgcctcagcctccccagtagctgggactacaggcgccttcaaccatgcccggctaattttttgtatttttagtagagacggggtttcaccatgttagccaggacggtctcgatctcctgacctggtgatctgcccgcctcagcctcccaaagtgctgggattacaggcatgagccaccgcacccggccttcccaaagtatttttaaatgtgcttttttatccccagtatttcccattaactggaatttgggattagagacccaattagggacagattaaatattttggcaagaatacttaatgggagaaattttgtatttcaatttgtaacccattaggtggcatacaatgtcattataccactatggtatccttagttcattcacttggtgtagcagaacatacattccaaagatggccacaccaatatatcccattctgcatgttcatcttacaatgtgataccaacactccccaagaggtagagctcatggtccttccttttgaatctggccaggtgggcctgtgtttatggcaggaataacactgtgatttccacgactaagtcataaaaggcaatacagcttctgcctgacccacttgggatgaagcccagccaccatgctatgaagatgccaagtaatcacatagaaaagctaagtaaagctgtcctgattacagctgtaattgaggtaacagccgggatccagcaccaagtgtatgagggtatgagccttcagatgattctaacccttagccttcaggctatcctagctggtgctaagtggagcagagaaaagctttcccccatgagcctgcccaaattgcagatttacgtttaaaatatggcctgttttaagccactaagttttggagtagtttgccacacagcgataggtaactgaaatacttgcttcatatggtaatcaccaggtttctctgttgtagagctaaatatttcttttaatttagtaaacgatctgtagagtagtactttggcatttcggaaatttaaaatctccaataatataatgacactagatcaaaaagaaaatgaaaccataaaggacaatttagaaatgaatggtaagatcagaatttgtgaatgtggccaaacctgtgctcagtgaaaaatcagtaacctgttaatatattcaggaaacaaatattgagggccagcactttgtttctcctgctcaccactctactcccagtgacttaatactgtctctttaacatagtaatcacttataaaactgttaaaagaatgaagaagcattaaactcaagaaactaagggaaaaataagtcaatataagaaagaagggaggatcattaaaaggagttaatgaatttgaaaataaaatagacttattaaggctttgtgaaaaaatattaatacttgattttagtatagctaatcaaaggaaaaagataattacagcattgtgaatgagaattggatgtaagtacagatggaggagatattttttgttttattgaaaatttcaaggaggaagtaatatcaaaatttcactagctctttctacactgatattataatcctgataatacaacagatgaggatagttcttaaaaggcaaaaatgtaggtgagtcattacgaagaaagcagaaattctaaaccatcagcacattcattcaaaaacctagtaaagcaattaagcaaaataatttgtttacttggactgtccagggatagatctgttctagttttccaaattaatgatgggaaaggaagagctgatccagtccaagtatcttcaagatccatgttctcagtttttcttagctttaaatggccaaattgtggcttagattggatatgataatttcctcaatgcttaacactgagcacaatttttcacatatttgaaatcaaggtgtatcttacaatttatggcatctgacaatacttccaaccaggtggcagtcatcaagcagttttgtgaaaagccttcccggtaagaatacaaaagcatctgcaccaaaatatatagatttaatggcatgtaggggtttgcgtgaatatatacagttgaaattcaattcttccttaaaaataattgtaactcatttctttaagactaccatactaccactttcctcaacttggactaatgtccattgtcaaccaaaatgtctgtgatctcatggatccattatgatttgcaactccaggtccattttatgcaaataagacagccataatatatcattgtacaagtcatttactatctaattatatcattgctcaacatttgcaaattatttttacaaataacaataattggatgtaacaaaaagcagagtattttgagacgtatattaatgcaaaatattgttaatgtatcagtggattgttcctccaaagtaccagtgccttaacacaacatatctaaaagaacatctctgggaacagtagtacttaatggcaacttgagaattggtttgtgggcacacagccttgtgaagttttgaatactaaatcccttttttaaaaaagtgcttattatcaggctatcaatcaaaagatttgagtctttcagtaaagaaaatttgcttaattttatctagtgcatgataaactttactaaggaagtctcattcagaatatctaatattttggatgtgagcccacactggaaatgccataaccaaaaaagagtgaccctaaagatagaatattcagatctaatggcagatgcttagctatgctgggaaaggaagtgaattgtatattgctctgctgctcacatattcctctgcaataaattgctggcccagtttagtttttatatactcactactatactaatgaggatggctcaattttttatttgaacgtactataatgaatttaaactttcattggtatttatgttttaacaggttttcactatttcaaatatacttcaataaatatccttgtctgtgatcattggtttatgtgaattggaatttcagtagctgtatatacatggaagtacaattgctcatacatcatacactctttcagttatgttagataatactaaatcaaccatgggttctgtataccctactagatatttccaaattgttctcttagactcctgagaactggtaaattgagtgctatagcttcagtttaggtatgtttttgtatgtattcctaaattttgacttaagccatttttcaaatgtatttcttggcctatcatcattcctttactttgactttcatattcttggctttctccattatttttgtcttgtttttttcttccctctaattgacttgaatgtcattctggatactttgctatgttgatgcagtattttccaccacatgcatatagtctgaccatgcattctatctttatgagacattttaagatttataggttatcagttatgtaatctttgcagattacacaaataaaattttattttccagtatttatatttatttttcttattgcaatagctagaatcttcagaacacagttgaatattatggtagtaggtatcttttgtttccaaatttaatggaatatttcccaacatttttttctttggtcctatgtttcctcaagaacctacatttaatcatttactataatattcactcttcatttggggataaattctctgctgactttaaatttccttcaatatatgtaggggtagagggaggatgcctacttttgtagtgattgttaatttaaaaactgctgaattttttccaaggccattttgttatctattttaattttatgtttttctccttaaatttattgatgtattgatttgtacttatgactttattaaattttaaacatttcttgtaatatgctacaatttttgtcatactgctagagtccatttggtgatattttaattagaactttttcatctatagtcaaggcagtattatagtttctttttattttattgataagattttagagttgtaatgatctgttctttaacacctagaaacaatttgtccttaaagtatttacatttttgtatcttgatattacattttatgatttgctaaattcacttagctttagcagggttttttgttttttttttttgagacggagtcttggtctgtcgcccaggctggagtgcagtggcgcaatctcggctcactgcaagctccgcctcccgggttcacgccattctcctgcctcagcctcccgagtagctgggactacaggcacgtgccaccacgcctggctaattttttgtatttttagtggagacggggtttcactgtgttagccaggatgatctcgatctcctgacctcgtgacccacccgcctcagcctcccaaagtgctgagattacaggcgtgagccaccgcgcctggcctagcagggtttattttttataaattacttagaattttctataaacgcaatcaggacatctgtcaagacagttccttttaatttatatttcctttatttgccatactgcacaggctagggcattctgtagagtgttgaatggaaatgttcaaagcaaggctgggcgcagtggctcacgcctgttatcccaacactttgggagtctgaggcagttggatcacctgaggtcaggagttcgagacaaacctggccaacatggcgaaaccccatctctactaaaaatacaaaaattagctgggtgtggtggtgcacctgtgatcccagctactcgggaggctgaggcaggagaatcacttgaaccctggaggtggaggttacagtgagccaagatcgtgccactgcactccagcctgggcaacagagcaagacgctgtcttaaaaaaaaaaattatcagagcagacatccttaccttgagtctgactttagtgaaaaagcagtcaataatttatcataaagttctatgttagctgtttattttccctagatattctttttggttttttgacaaatcttggggcaatttgccattgaagtcatctgagtcaacctttctttgcggaaaggatttttagtggtagtttcaaggacaatataccaaaaatattgaatttttctatcatagcaaacaattgaaaatgaaatcaaaaaaattttcattgataaagaacataaaatacttaggaatatatttaacaaaacacatgcaagactactacctaaaaattacacaattttgttgagagaagctagggaaggccttaataaattgaaacatcttccataattacagatgagaagacccaatgtttagaagtcatttctcaaattgatctagggattcagtggaatccagtcagaatttgttctggagcacagcagtgaagtgaggattggagggagctggtgtagctgcactttgaggtaggttcattagctgttgcaaaaggctggtgatagtcactgttggaagatgatagaggaggagagagaagggactcagtaagcatggcagcacctcatcttgtgcatctttcttgataaggaaagggaggtccctggctgttgtcatgaaaatgtcagctgcttgctctgtggagaggaaaggaagaatacgggcaaccactgtcttccctttttggatacacatgatctgtacaaagcggtcatcactaggcctctcttgtccaggctgtttccctcttaagttgtcatacatgctacaaattccgtactttcgctcatccattagagcaggtcgctgtcttagacttaggagataatgtctttcatagtcctccacatcaaggagtaaactgtaggttttcttaattatgacgggtttttctcctcttgtctcgaatttgtttttcttttatctcatcatcctcactccaagatgtcacaacagcatcaatcatttttcagggattattcacactagaaacagtaagctttcccaaagagcccacaaattgtactggcttataggtgcgctccagtttggccacttgaggggtaataagcttgttatgctcctttttagggccatcacctcgtatttcttcagcagctgatggtttctccagtttttcaaagtaattctggtaataaaaatcatccaggtggggaccattgctttgcagttgcatcatctgaattttagaggcccaatccttttcccacagcaacatgagattggcatatggatcctttcggagatgatcttgatgactgctccagtgacttcctctatctcctgcaccactgagattctgatgctgatttctattctgttgctgtctctgatgcaagagtcaatggtgctgtggatggaggggagttgcgtccagtctaaacactgggacttgagatcttaagttttgcaagtgaggtcctgggccaggagggcgctgctgtggaggtggtgtagcggagggtggagcactaaagaaggcatggaagcctggtgctgggggaagcatctgcccaacttgcccttgtagcaacttgggattcatagcagcatgcagactaccaacaaatccagggacccatgcaaactggctgggagacatctgtccaggctgtagctgtgctcctccaagaagctgtgctctctgaaaggggctgagaacaggaggaacactaggaggaaaagggtgacccaggagggaagagttcaggacactgtagagctgatttggaggcatcctctcatcatagggaccaggataacacggtggcattgggggccgaacatggacaggctttgaacgcagaatcttccaaattggctttcgttttcagttgctggtttcaggcggaggaaagtctatggaataggactgcacaggctctgttgggtaaagctgggtacggccatctgcttaggtggggtgcctatggggacagctctaacaggaggactgccaatgacaggtgaagttgaccaccttggtaatgcatgttcagaaaggtcccaatcattttctggaccctggggggcctctgaggcaaggcatattctaatacagacactgtagacatttcctaagtgagcagtggtcctcagatttgcctcataactttggatccatcccagatactggaattcagatttcctggttggggttataaaactggcctggtctgcactgccctcatgatagctggatcttctagttcattttcaatcaccatcttactgagcctttctgccagattttcctcatggtcacccaacaagtccatttcttccctttctccattgcctgtttgttcattaactgccactggtagcttttcttccaattcagccaggcactcatgtgcttcctgccaatcatcatcaactgcacctgacccaaaaatatcatcattgaattgatcaatctcttcatcttcttctctcagtccctgaaattcatcttcatcttcatccagaagacaatcctcccaagactcatagtggaacattcttggggaggtgggggggagtggggaggggagtgggggagggagggaagaagcactgactccctgggctcctccatgggcaggtcctccaccagcttgcgacccctggccacctatttctgtttctttttttgttcctatgaattctagttactatcatgtatcatttccttactccaatacaactctgctgtcatttacttcctttatgctgttattgtcaaatatattacatttccatgttataggcccaacaatataattatgtacatactgtattatacaactgccttttaaatttattaagagaagtaaaaagaaatgtgcatttgtgctgctttttgtaattttaattatattaattttgttctttttaaaaatgtggttttgaatttccatgtagatttacttgctttgtttgaataacctttacaatttcttatgtggtaggtctgggaagggctttatttcaccttcatttttgaaagacagtgtgttactgcttgacagagcttttgtcgtttgagtactttgaatatatcatcccactaccttcatcccctccattgctttggataagaagtcagctgtcaatcgattggtgttccattgtaagcgacacatcatttttctcttatatttttcaacattttctttcacttttagcatttctactatgataggtctgttcatggatatcttcgcattcattctgattacagtttgttgagatgcttgtgggtattgattaatgtttattcaacaaattgtggatgtattttgccattatttctttgaatatttttgtgctcatttctctttctcctttccttctggtattctcattacatgtatgttcatgcacttaaaagtgctctgttcatattttcttgttcttcaaggctctgttcatattttctttgttctattttctcattctatttcattttattttcttattcttttttctagtgggaagatggaattgaggttgcataatttccattgatctgtttgaaagttttctatttacttgctgatcaaatttgtttagcccttctaatgaattttttattttggttactgtagtcttcaactccagaacttacatttggttcattttgtcatttctccttattgattttctttatttgatgagacgttatctttatattttcctttactgctgtgaatatataatggctacatcgaagtttttgtctattaaatatgacatctgttccctgtcataggccaacctgttgccgtttttttttgttgttgttgttgttttgttttgtttttttttaagagtcttgctctgttgcccaggctggagtgtagtggtgtgatcttggctcactgcaacctctccctcctgaattcaagcgattctcgtgtcttagcctagttataggcatgtgctaccatgcctgcctaatttttgtatttttagtagagatgggatttcatcatgtagtccaggctggtctcaaaactcctgagctcaagtgatctgccaaccttggtctccaaaagtgctgggattacaggtgtgacccactgcacctggcctgcttgctgttctcctgtgtataggtccaactttcccatttgtttgcatgtcttaatttactttttattattttcctaataagtagacatattaggaaacatactgtagtgatttgcctgtcccctctccagagcttgttcttgttgttgtttgcttggctatgtattttgtgttttggctaagctattttagtaaaatcgatttccctttccccttgcagtgtgaagtattttgtgttgttcctcagccttaaacatatgcagttaccctgctgtgacaatggttttaaacaggagtctttttgactatctttccctatctctctgttaagataactgcccccttggtattatttccagcccactaagctccgctgccgtctatctggtcactccattgttttcaacatttccttggagcctaaattattaagcagtttaatataatttaagtcaggcagggctaatttttgaggccagtttttaaggtttcttttgacctttggagggctccttagctgtctcttcccatggaattatctgattaactacctggcctatggtttatgttgttgtgtttactttaggggagctatttgtttgacactgtttcagataaagtccattcctttggagagagcttcagagctctattcttatggactgccactccctctggacaaaatctctgaaccaccattctgggtaatgggctgggttgtagccatcttgttttttatgttatgaaacctctgccttagaagcaagtggaggcaagggcaatctgggtgcaaatgagttcactctgcctgggtagagtttccaaactctgggtggggctgggggaagcaaaggagccccaaacctcctagttgcgttcaccaggaatttagccactttaaccaagagctggtggggataagaaaccctggaggcatgcccctcctgttgatatatgacaaaccttgattgacagctgcagccccatcatcttggcagcatccacccacagagaagcttctatcaaattgagctgtgaagagtaaaagggagttgtgtcttaaatgccacaaattctcttaccaagttcttggttcttaccaagttttagtagaatttcttgatatttcacttcctatatactgtttggacactttcagacctcaaatggcaaggtttttatacatttttttttgccagttttattagaaaatgagtttgcagagcccccccatctaccatccagaagtggaactacatatagtcatttaacaatagtttagcattttctgtcatctcattctggagaatcatagatgtggcagaaatacatattcttgaagaaaaaaaatgtctcccttatgggtactgtgatttcaatagggtgtgggataagtacatgacaacatgcatgggatagacactctgttctctacagatccgtgctttggaattacagaacataaaagatataatgatggttattactttttacatgtgacaatctagttgtagcgtttaagattaaatttggttgtgagtaaaatagtaaaactgccccaaattaaagtggataaaatataataaaagttaatttctctgtcatataatatggatgtaagcctgatactgtggccttgctctaaaccaatcatgaattttaccattctggcatcagaatggaatgagcactcagacttatacagaacttggaagaatagtaaataattctggttacccttcacccagatttctcaaatattaatatattaagctagtttgttttaagaggtttccagaattgccaaaatattcacttacatcctacttgccataagttatgtcacatgacaacaccttggagaaataactgcagtccttattctagatagtcacagccaactatcaataaaaattactggttctataatcatgaaagcagggtagaatggatatgcgggcctaataaataacagatcctgacccactgaggaatcctggagatggtttcattttgatcaattacaaatgaagacagtgaatccctgagaccacaacttgtgcagaagactcattgaaatggaatggtattctggaaattaagacacacaggtccgttatccctcataccccaagctggatgatcacaataccctgtaaaaggatgacagaaatcttgtgtctactttttcttcttttctggggagtctatgaacattcaagataacatccatgactgaatattctaaaacaagtttctttacaacgctgctcagaaacaccatgacaaatttaaatcagagcaatatctccaaaaatgggaggcagattaatgtatcatttcagccaggccttaaaaggagataaacttctcagctatcaccatacataaaacataattcaataaaataccaaatgcaaacaagagcagatcatagaaatgtaagttgagaaaattcagagggaacttctgaccttaggatgacattttcaactctgaaactattaaaagaattctaacaaaagcagcatctttttttccatacctgtaactgccatgtgcactcacagcagccagattttttggtctctaattcttttttcctctaaaaggaaccaggactccctaagataagagggtattaaatcatgagttgattccatgactcaggacaagaggcatgggggacatgaaccaacaaacagggtcagtcttaaacatcctcttacggcctgaaaacaatattcctttaaaacatcaaaagaaaaaaataagtagtaaaaaaaaaatgtaaatggattcctactggccacattatgtcaatttgagcataaataataataattactacaggtgcttctcaacttacggggagttatgtccaaataaacccatcataaattgaaaacatcatacaccatatgtgcatttatggtctacaatattttcaatttaacaatgggtttatctagatatagccccattttaagtcaaggagcatactctgactgagtatgtcttagttttgtgttgctataaaggaatgtctgaggttgggttattaataaagaaagaggtttatttggctcagtgttctgtaggatttacaagaatcatggtgcaacatctgcttctggtaagggcctcaggctgcttccactcatggcagatgaaagggggcagtgtatgcagacatcacatggcaagagaggaagcaagagggtgaggaaggaggtgccaggctcttttgtacaaccagctctcataggaactaacagagtgataattcaccccccaatccagagaggacattaatttattcatgagggatcttctcccatgacccacacacctcccattaggccccacctccaacattgggatcaaacttcaatatgagatttggaggggataaatatccaaactatagcagcatatcacttttgtactattataaagctgaaaattataagtcaaaccattttaagttggggattacaggcgtgagccaccgtgcctggccgtgatttttaaatttgtacatacttggtttgtaactttaacaaatatattaaagtgttttattatgtttgcaaagggactctgacttccaacatagtactgccatgattgcatgatgatagagtttcaccgaaaggctgccagggatctttctgacaactcttaatgatactaccgggatgtgcaatgacccagaaaggagttgtgctaggttaatacccagggactctgctgatttcaaagaagaaagttcaagagaatggatagaaaaaagatgaaactggaaataaaaaataggaacataagatttgaaagccaagttttatataatcttgttttataagttgtataacatcattgcaatatcaatacctgaaaaatacttggaaaattataactttacttatgattatagatgcaattaaatggtaaaagatagaattaagtagtctattgaaagaataatcatctgaccagggtatattcataaaaagaagaaagctatcaatataaattatcactttatagatttttcaacacaatggaataaaatcacaaaggattattcttaatcttaaaaaaaatttaatctaattcatgatgccacatcggtatcatgttttgttttggggtttttttgagatgaagtctcactttgtcgcccaggctggagtgcagtggcacgatcttggctcactgccacctccaccttccaatttcgagtgattctcctgcctcagcctcccaagtagctgggattacaggaatgcaccaccatgtccagctaatttttttatttttaggagagatggagttttgccatgttggccaagttggtctcaaactcctgacctcaggtgatctgcccaccttggcctcccaaagtgctgggattacaggcatgaggccactgctcccggcttaatggtatcatgttttacagcttgatttaaagggttaatattttttcaaatttttatcaacagctcatgtaccagccatggtataggtgctggtgataaatgctgaacaaaaaagaggttccggacaatcttggctccctatacaatccaaagggtgccagttttgtactgagtacagtgtcagccatatcacacaagttgaattatgttgacgctttaatggcattcatttctcaatagtctatttcaattttcattttgtattcaatccagggcttaagtacacgtgactataacttttcagagatgacaacgtctctccatagattacttacccactacaaactaaatctttacaatggacttacggcggttaccagcttacccaaatgatcatccttagtttcactaatgcaaggacctgtacttaaatgttttctgacagtacaatatgacatagaaataacctacaaagtattcttccccaaaacgtttaatctagacctaagaaagcctctggacttactttcccttgtaaagaaaatacaaccaagaacaaggctaaatgacactataaagaaagaaatctaaacacatagccaacaacatttctgggctactcaaaattcaatgtcatttttttaaaatgagaaatgttctagaccagtggctctctaactctggttggtatcacagacacaaaacctggagaaataataaaaaacagaggcccaggcttataaactagggctacacttctgtaggtttactaagttccacaggggattctgatacccaccataatttgagagcatactttcatggggtttccatgctacaatacactaaagagagataaccaaatgcaatgcagaatctgcaatggactctccttagaaaatgaatagctgtaggccaggcatgctggctcatgcctgtaatcccagcactttgggaggccaaggcgggtggatcacgaggtcaggagatcgagaccatcctggctaacagagtgaaaccctgtctctactaaaaatacaaaaaattagctgggcatggtggcgggtgcctctagtcccagctactcaggaggctgaggcgggagaatggcgtgaacccaggaggcagagcttgcagtgagcccagatcgcaccactgcactccagtctgggcgacagagcgagactccatctcaaaaaaaaaaaaaaaaaaagagaaaatgaatagctgtaaaagatggtttgcaggccaaggaagaaatctgaagatggaatgatattacagaattatgaatattttccttaagggtaattatggtactatggttatatgatattgtctttatgtttgggtaacacacatgctgatgtaacaaggagtaaagtgtcatgatatctaaaacttattctcaatggtctaaaacttattctcaatggtacaacaaatatacaaaaaataaatgtggcaaattgttaacaattttgaatctaggtgggggggatatgtgtatatattttactattctttcaaaacccacaacaattatcaactaggttcaccatcttttatgggcaggatttgtggtatccccaaacaattacactagtaacaattacactagtaatcaaaaaacactggtcacagatcaccataacagatttaacaatgaaaaagtttgaaatattatgaaaactagcaaagtgtgacacaaagacatgaaatgtgcatatgctgtttggaaaatggtgctgatagacttattcactgcaaggttgctgcaaaccttcagtgtgtataaaatgcagtaactgcaatgcacaattaagcaaggtacgcctgtatccagtaaaatatttcacgggcagtaaactgtgaacatggcagctactctacattcctcacatcagtaactttctcaccaaaattatcttctctgaactctaaggcatttagtgtggctataaaatatcccacattctttacactcaaaggagttctcagcagtatgaatactctgatgttgagcaaatcccaggccacgatgaaagttcttcacacattcttttatgttcacaggatttctcatcaatatgaattctctggtgttgagtaaatttttcatacacagtgaaggcttgtctacactccttatattcataaaacttctaactataatgaattttctgatgttgcgtaagcagatcattcacagtaagggtttgctcacattctttacattcatagggtttcatgccagtatgaattctgtgatgtgcagaaaggactgaactaagtctaaaggtcttcccacatcctttacattcacagggttgctcaccagtatgaattttaacatgttgaacaaggctcgagctacaagtaaaggtctttccacattctttacattcatacggttcataccagtatgaattctttgatgtgcagtaaagactaagctaaatccaaaagttttccacattctttacactcacagggtttctcagcagtacggattctcagatgtacagtaagatcataattactgctaaaggccttttcacattccttacattcatagggtttctcatcagtatgaattttaacatgtttaacaggtttgaactatgactaaaggctttcccacattcttcacattgatatggtttctcaccagtatgaattctctgatgtactctaaggtttctaccactggtaaagcatttcccacatccttgacattcataagggttctcacgaatatgaaatctataatgtccatgaaattggtaatgatattgaaaggccttcccacattccttacattcaaaggttttcacccaagtatgaattttctgatgttcagtaagttgctactgatgtctgaaggctgtcccacatttcttacattcaaagggtttctcacctgtacaagtttttgatgcagagaaagttgtaggtgaagtctaaaagccttcccacactccttacattcatagggtttctcaccagtatgaatactctgaggttgaacaaggtttgagccacgattaaaggccttcccacactccttacatttaaatggcttctcaccagtatgaatgatctgatgttgagcaagctgtgtcagaagaccaaaggcctttccgcattctttacattcaaagggtttctcaccagtatgaattcggtaatgttcagtaagctggtaatgatatctaaaggtcttcctacactccttacatacaaagggtttcgcactggaatgagttttctgatgctgaataaggtttgaaacacgactaaagcctttcccacactccttacattcatatggttttacaccagcatgaatactctgatgttgaacaaggtttgagacacgattaaaggacttcccacattctttacatttaaatggcttctcacctgtgtgaatgttcttatggtgattaagctgggtgtgaagactgaaggccttgccacattccttacattcaaagggcttctcaccagtatgaaatttctgatgtcgaataaggtgcatatgaagtcgaaaggctttcccacattccttacattcaaagggtttctttccggtatgaatacttcgatgttgattaagatttgaaccacgacgaaagaatttcccacattccttacattcaaagggtttctcacctgtatgagttttctcatgttgagaaagttgtaggtgaagtctaaaagccttcccacactccttacattcatagggcttctcaccagtgtgaatactctgatgttgaacaaggttcgagccacgattgaaggccttcccacagtctttacattcaaatggtttctcaccagtatgaatgttcttatgtcgagcaagctgtgtcagaagactaaaggcctttccacattctttacattcaaagggtttcccaccagtatgaatttggcaatgttgaataagttggtaatgatatcgaaaggccatctcacattccctacatacaaagggtttctcattggaatgaattttttgatgctgaataagatttgcaccacgattaaagcctttcccacactccttacattcatatggttttacatcagcatgaatactctggtgttgaataaggtttgaactacgattaaaggacttcccacattctttacattcaaatggtttttcacctgtgtgaatattcttatggcgattaagctgattgaggagactaaaggccttcccgcattccctgcattcaaagggcttctcacccatatgaatcttctgatgtcgaacaagctttgtcagaagagtaaaggcctttctgcattctttacattcaaagggtttctcgccagtatgaattcggcaatgttcaatgagttggtaatgatatcgaaaggccatctcacattccctacatacaaagggtttctcattggaatgaattttttgatgctgaataagatttgaaccacgattaaaggctttcccacactccttacattgatatggttttacaccagcatgaatactttgatgctgagtaaggtttgagctacgattaaaagacttcccacattccttacattcaaacagtttcttaactgtgtgaatgttcttatggcgattaagctgggtgggaagattaaaggcttttccacattccttacattcaaaagttttctcaccagtatgaaatttctgatgtcgagtaagttgtatgtgaagttgaaaggctttcccacattctttgcatttatagggtttctctccagtatgaatactctgatgctgaataagatttgaaccacaactaaagtatttcccacattccttacattcatatggtttatgtgtattatgaataggagaagcatgagtataagcaggcatttcttcatagctgatgatcttctggttgatatatccttcttgatgtccctgtcgtccctcaaatctacttctatattctgagtcatttctaaaataaaaggcctcgaggccaagtgttttacttatttgctttataacatgtttgggtaaatttatttcaaaaatatcattttctggagatattttctcaggtccatattttgactccaaatctgaaagaaatgaagaaggcaaacctattttattttcctataacatacatgcatacaaaatccattaaacaaatggcctaagtataaaatataatactttcagggaagggatctgaaaaaggaaaagggtgccaataatgaatttatgtaagatggtggtgtgcataagggaacaggttaactttgtcaaatttaggtgtgaatcaaaaccatttggtaagattaaatatattgatattcaagcaactcagatgtacagaatcagaatttttagtgaagaaagctttttttttttttttaagacgaagtttcactcttgtcgcccaggctgcagtgcaatggcacaatctcagctcactgcaccctctacctcctgggttcaagtgattctctggcctcagcctcagcctccagagtagctgggattacaaacatctgccaccgtgcctggctaattttggtatttttagtagagacgaggtttcacaatgttggccaggctggtctggaatgcctaacatcaggtgatccacccaccctggcctcccaaagtgctgggattacaggtgtgagccattgtgcctggcctctattttttttttttttttttaagagacagggtctctctctgttgcataggctatagtgcaatggcatgatcacagctcactgcagcctcaaactcccaggctcaagcaatcctcctgcctaagcctcccaagtggctacagctacaggcacatgccactaagtctggacaatttctttttctttagtcttcctgcagtccaaagtctggctaatttttactttatttttatttttactttgtagagatggtgtcccaccatgttacccaagctggtcttgaactcctggcatcaagcaatcctcctgccttgatctcccaacatgctgtgatcaccagtgggagccatcacacccagccaaagctgtatttttaatatctctaccagatgattctgattcagatcaaagtttacagatcatacttaaaactggttttgaatggtttatctttagtcttagcacaaaatccaaaaaccttaacacagagaacaaaacttcctatcagggcactgtcctcctttgtggctgatctctaaccactccctccttttagcaaccagaacatgatataacctttctcttatcttcttgcttgcttagactgcttcatcttccaagaatcgtctggctttgctctttgtaacaaacatccaactcctcttttttttttttctgtttatatatatatatttttttaattttattattattatactttaaattttagggtacatgtgcacaatgtgcaggtttgttacatatgtatacatgtgccatgttggtgtgctgcacccattaactcgtcatttagcattaggtatatctcctaatgctatccctccccacctcctcccaccccacaacattccccggagtgtgatgttccccttcctgtgtccatatgttctcattgttcaattcccacctatgagtcagaacatgtggtgtttggttttttgtccttgtgatagtttgctgagaatgatggtttccagtttcatccatgtccctacaaaggacatgaactcatcattttttatggctgcatagtattccatggtgtatatgtgccacattttcttaatccagtctatcattgttggacatttgggttggttccaagactttgctattgtgaatagtgccgcaataaacatacgtgtgcatgtgtctttatagcagcatgatttataatcctttaggtatatacacagtaatgggatggctgggtcaaatggtatttctagttctagatccctgaggaatcgccacactgccttccacaatggttgaactagtttacagtcccaccaacagtgtaaaagtgttcctatttctccacatcctctccagcacctgttgtttcctgactttttaatgatcgccattctaactggtgtgagatggtatctcattgtggttttgatttgcatttctctgatggccagtgatgatgagcattttttcatgtgttttttggctgcataaatgtcttcttttgagaagcgtctgttcacatccttcgcccactttttgatggggttgtttttttcttgtaaatttgtttgagttcattgtagattctggatattagccctttgtcagatgagtaggttgtgaaaattttctcccattttgtaggttgcctgttcactctgatggtagtttcttttgctgtgcagaagctctttagtttaattagatcccatttgtcaattttggcttttgttgccattgcttttggtgttttagacataaagtccttgcccatgcctatgtcctgaatggtattgcccaggttttcttctagggtttttatggttttaggtctaacatgtaagtctttaatccatcttgaattaatttttgtataaggtgtaaggaagggatccagtttcagctttctacatatggctagccagttttcccagcaccatttattaaatagggaatcctttccccattgcttgtttttgtcaggtttgtcaaagatcagatagttgtagataggcagcattatttctgagggctctgctctgttccattgatctatatctctgttttggtaacagtaccatgctgttttggttactgtagccttgtagtatagtttgaagtcaggtagtgtgatgcctccggctttgttcttttggcttaggattgacttggtgatgcgggctcttttttggttccatatgaactttaaagtagttttttccaattctgtgaagaaagtcattggtagcttgatggggatggcattgaatctataaattaccttgggcagtatggccattttcatgatattgattcttcctacccatgagcatggaatgttcttccatttgtttgtatcctcttttatttccttgagcagtggtttgtagttctccttgaagaggtccttcacatcccttgtaagttggattcccaggtattttattctctgaagcaattgtgaatgggagttcactcataatttggctctctgttggtctgttattggtgtataagaatgcttgtgatttttgtacattgattttgtatcctgaaactttgctgaagttgcttatcagcttaaggagattttgggctgagacaatggggttttctagatatacaatcatgtcatctgcaaacagggacaatttgacttcctcttttcctaattgaataccctttatttccttctcctgcctaattgccctggccagaacttccaacactatgttgaacaggagtggtgagagagggcatccctgtcttgtgccagttttcaaagggaatgcttccagtttttgcccattcagtatgatattggctgtgggtttgtcatagatagctcttattattttgagatacatcccatcaatacctcatttattgagagtttttagcatgaattttgttgaattttgtcaaaggccttttctgcatctattgagataatcatgtggtttttgtctttggttctgtttatatgctggattacatttattgatttgcatatgttgaaccagccttgcatcccagggatgaagcccacttgatcatggtggaaaagctttttgatgtgctgctggattcggtttgccagtattttattgaggatttttgcatcaatgttcatgaaggatattcgtctaaaattctcttttttcgttgtgtctctgcccagctttggtatcaggatgatgctggcctcaaaaaatgagttagggaggattccctctttttctattgattggaatagtttcagaaggaatggtaccagctcctccttttacctctggtagaattcggctgtgaatccatctggtcctggatcttttttggttggtaagctattgattattgccacaatttcagagcctgttattggtctattcagagattcaacttcttcctggtttagtcttgggagggtgtatgtgtcgaggaatttatccatttcttctagattttctagtttatttgtgtagaggtgtttgtagtattctctgatggtagtttgtatttctgtgggattggtggtgatatcccctttatcattttttattgcatctatttgattcttctctcttttcttctttattagtcttgctaatggtctttcaattttgttgatcttttcaaaagaccagctcctggattcattaattttttgaagggttttttgtgtctctatttccttcagttctgctctgattttagttatttcttgccttctgctagcttttgaatgtgcttgctcttgcttttctagttaattgtgatgttagggtgtcaattttggatctttcctgctttctcttgtgagcatttagtaccataaatttccctctacatactgctttgaatgtgtcccagagattctggtatgttgtgtctttgttcttgttggtttcaaagaacatctttatttctgccttcatttcgttatgtacccagtagtcactcaggagcaggttgttcagtttccatgtagttgagtggttttgagtgagtttcttaatcctgagttctggtttgattgccctgtggtctgagagacagtttgttataatttctgttcttttacatttgctgaggagtgctttacttccaactatgtggtcaattttggaataggtgtggtgtggtgctgaaaagaatgtatattctgttgatttggggtggagagttctgtagatatctattaggtctgcttggtgcagagctgagttcaatttctgggtatccttgttaactttctgtctcgttgatctgtctgatgttgacagtggggtgttaaagtctcccattattattgtgtggcagtctaagtctctttgtaggtcactcaggacttgctttatgaatctgggtgctcctgtattgggtgcatatatatttaggatagttagcgcttcttgttgaattgatccctttaccattatgtaatggccttctttgtctcttttgatctttgttggtttaaagtctgttttatcagagactaggattgcaacccctgcctttttttgttttccattttcttggtagatcttcctccatccctttattttgagcctatgtgtgtctctgcatgtgaggtgggtttcctgaatacagcacactgatgggtcttgactctttatccaatttgccagtctgtgtcttttaattggagaatttagcccatttacatttaaagttaatattgttatgtgtgaatttggtcctgtaattatgatgttagctggttattttgctcattacttgatgcagtttcttcctagccttgatggtctttacattttggcatgtttttgcagtggctggcaccggttgttcctttccatgtttagtgcttccttcaggagctcttttagggcaggcctggtggtgacaaaatccctcaacatttgcttgtctataaaggattttatttctccttcacttatgaaacttagtttggctggaatgaaattctgggttgaaaattctttcaagaatgttgaatattggcccccactctcttctggcttgtagagtttctgccaagagatccgctgttagtttgatgggcttccctttgtgggtaacccgaccttactctctggctgcccttaacgttttttccttcatttcaactttggtgaatctgacaattatgtgtcttggagttgctcttctcgaggagtatctttgtggcattctctgtatttcctgaatctgaatgttggcctgccttgctggattggggaagttctcctggataatatcctgcagagtgttttccaacttggttccattctctccgtcactttcaggtacaccaatgagacgtagatttggtcttttcacatagtcccatatttcttggaggctttgttcatttctttttattcttttttctctaaacttctcttctcacttcatttcattcattttgtcttccatcactgataccctttcttccagttgatcgcatcagctcctgaggcttctgcattcttcatgtagttctcgagccttggctttcagctccatcagctcctttaaggacttctctgcattggttattctagttatccattcgtctaattttttttcatagtttttaacttttttgccattggtttgaatttcctcctgtagctcggagtagtttgattgtctgaagacttcttctctcaacttgtcaaagtcattctctgtccagctttgttccattgctggtgaggagctgcattcctttggaggaggagaggcactctgctttttagagtttccagtttttctgctctgttttttccccatctttgtggttttatctacttttggtctttgatgatggtgacgtacagatgggtttttggtgtggatgtcctttctgtttgttagttttccttctaacagacaggaccctcagctgcaggtctgttggagtttgctagaggtccactccagaccctgtttgcctgggtatcagcagcagtggctgcagaacagtggtggctgtagaacagtggatattggtgacccgcaaatgctgctgcctgatcgttcctctggaagttttgtctcagaggagtacccggccgtgtgaggtgtcagtctgcccctactgggggttgcctcccagttaggctgctcgggggtcagggaaacacttgaggaggcagtctgcctgttctcagatctccagctgcgtgctgggagaaccactcctctcttcaaagctgtcagacagggacatttaagtctgcagaggttactgctgtctttttgccctgcccccagaggtggagcctacagaggcaggcagtcctccttgagctgtggtgggctccacccagtttgagctccccggctgctttgtttacctaatcctgggcaatggcaggcgcccctcctccagccttgctgccaccttgcagtttgatctcaagacagttgtgctagcaatcagtgagactctgtgggcataggaccctccgagccatgtgcgggatataatctcctggtgtgccgttttttaagcccattggaaaagcacaatattagagtgggagtgacccgattttccaggtgccatctgtcacccctttctttgactaggaaagggaactccctgaccccttgcacttcccgagtgaggcaatgcctcgccctgctttggcttgcacacagtgcgctgcacccactgtcctgcatgcactgtctggcactccctagtgagatgaacccggtacctcagatggaaatgcagaaatcacccatcttctgcatcgctcatgctgggagctgtacaccggagctgttcctattcggccatcttggttccacccctctaactcatcttttaagccttaggataaatgttttcctcagaacatctgaatgaatgaataaagccaccgtaacatatgggacatcataaaacaacaaaatatttgaatttttgaggtcctagagacaaagagaaaacataaaggatagaaaatctatttaatgaaataatagcaggaaactttccaactctagtaagagatgcagacatcttgatacaggaagctcagagatacccaaatagatacaatacaaaaaggtcttctccatggcatattatggtcaaaatataaaagtcaaagacaaaagagaatactaaaaacagcaagagaaaagcatctagtcacttacaaggaaactctcatcagcctaacagcagatttctcaacagagagaaatgagagagaatgtgattatacattcagtgttgaaagaaaaaaatcaccagtcaaggacactatcctcagcaaagtattctacaaaaatgaaaaagaaatagtctttcccagacagcaaaaggtgacagaattcatcaccactggaccaaccctacaagatatgttcaagagtcctacacctagaagtgaaaggacaatatctaccattgtgaaaacacacaaaagtataaaacctactgacacagcaaacatacaaataaggacaaaggactcaaatgttacccctaaagaaaacaaccaaaccacaatgataaaaaataaaagagaaaggaacaaaggataaacaaaacaactagaaatcaattaataaaatgataagaatcagccctcacatatcagtaatcacactgaacgtcaatggattaaacttcatttaaaagatacagacgggctgaatggatgaaaaaacatgatccaactataagctgcctacaagaaactcttctcactggtaaagacacatatggattgaaagtaaaagaacaggaaaagatattccatacaaatggaaaccaaaagtgagtagaaatagctacgtttatatcagaaaaaaacagattttaagtaaaaaacagcaaaaagagacaaagaaggtcatcatataatgataaagggatcaattcagcaagagaatataacaattctaaacatataacaccaacaccagaacacccagatatataaggcaaatattattagagcaaaagggagagagatactacagtataataatcactggggacgtcactgtgccactctcagaattagatcatctagagagaaaattaacaaagaaacattgggtttaaacatacctgagaggatgagggaaaaagggaactcttatatactgttggtgggatataaattagtacaatcactatggaaaacagcatgcagatttctcaaaaacctgaaaatagaactaccatatgatccaacaatcccactactgggtattaatccaaaggaagataaaatcagtatatcaaaatgatacctgcacttgtatgattactgtagcattattcaaaataccaaaggtatggaatcaacctaagtgtcccccaacagacaaacagataaagaaaatgtgatatatacacatggaatactattcaggcatttaaaaaatgaaatcatgtcatttgcagcaacatggagggaatcggaggtcagaaagacaaatatcagactgggcgcagtggctcacacctgtaatcccagcactttgggaagccgaggtgggtgaatcacctgaggtcaggaatttgagaccagcctggccaatgtggtgaaaccctgtctctattaaaaatacaaaaattagccaggcgtggtggcaggcacctgtaatcccagttactctagaggctgaggcaggagaattgcttgaacccaggaggtggaggttgcagtgggccaagatcgcaccactgcactccagcctgggcgacaagaatgagactccaactcaaaaaaaagaaagacaaatatcatatgttctcattcatatctggaggctaaaaaaagatctcacagaggtaaagaatagaatgatagaaaccagaggctgggaagggtgtgtgggtgaggggtgggggatgaagaggagttggttaatgttacaaacatacagttaaatatgaggaatgacttctaatgttcataagcagagtagagtgactctaattaacaacaatgtattgtatatttcaaaatagctagaagacttgaaatgttcctatcagaaagaaatgataaaccctcctctggtggatctgatggatacctcaaataccctgacacttgttcattacaccttctatgcatggaacaaaacataacatgtatcccataaatatgtacaaatattgggtatcaattaaaaatgaataaataactcttgaagaacttcccacattcctcacaacgacagtcaaaaccctgtatgatacgactccgacgtaactctcagacctttcttcccgctgttccattacttactccacctttgtgtttcctgctcagtctgactagagtacttgaacacttacttcacatctctatgcaagcaagcccacttccagacaggtaccctaagcacccaagtgctgccattctcaccccatcactcctatttccttgtctctatagcatgattatttggtattccttatctattcatttgcttacttgtttgaggcatgtctcaccaactgctggtaaagtccatgacagcagtgactttctcagtcttgttcattacctgtacattacagtattgaccagagccaagcatatgccttctaggaatgcgcactctatacatatttactgaacatgaatacatttcttagtgaaaacacatgtagaaatctaaatgcaaaagcagagttggaaagtagctggatccaaaatacgtgttaaaagtttacactgggggccagaagcattggctcatgcctgtaatttcagctacttaggaggttgaggcaggaagactacttgaggccaagagttcaagatcagctggggcaacatagcaagatgctgcctcttaaaaaataattttaaaaactgtttaaagtttacactgggaaagaaagaggaagctcacttcattaaaagaggaagaaaataacagaaattaggtgattagtaaatgatgaagttccttggggacagctcctacagtgatcttatttccttcccaggtcttgggcatttttgtccagtgggggaccttgggttattgaagaaagttttccaaaccacatctcaggggtgtgactcctctctgagcacatgggctgtccgggacaatgatggcttccccctgcctgctttactctcacttacctggataccatctgcttgtttctttacttacaacaatccagggctctttctcttgctctagtaatgtaatcacatctggcttagaaatggaacttcctgcttaaaagaaataacacatgtagaatttttttaatataaaaattttttttaaaccctgagacctagttaaacttataataaattacaagccaaaacaatattgagaagagactccagataagagaggattgagtaagggatcaactatgtttaaaaaaaaaaaaagcactttcatttaaactcataatagaaacttatccctcaagaggaggtataatttagtggttaacagcaggaaacttcaagccagattacctggttgaaatcctgtctctgccacccactagtactttgacattaagtaagtcacttgaactctctgtccttcagttttcccaactctaaaacagaaatataataatgcctgttttataggattgatactaatattaaataaggtaatatatgtaaaatacttctaactctcactcatacgtagtagcacaaagttaaaaattattatgtttattgtcattatttattttgcatccttagacatttacagctcattttaagaattttcacccaacagaaaagcatacacttcatggcctgaaactttcaactacaaaacaagtaacggaaggtctgtcgaaggaaatggaatatactgacttagtgctaaataagttctgtcaacccaatcagtatatgtaaatcattgaggctctgttttgttttgtttttttgagacagtgtcttgctctgttgcccaggctgaagtacagtggcatgaccacggctctctgcagccttgacctcccaggttcaagcaatcatagaggctcttttaatagaaaaactcaacacactcttctccttacaggtgggccagaaaaacaaaaacaaacaaagaaaatctacagtaattctgagatcaaacataatatgaaacctggttcttgaacaatatcattcaacgaatatacaagatttcaaattcagccccatggtcatgaagagagagaggggattacagagatgaccagcataatggaggaggccctggtgcagtaggcaagatgcagaggctccaaggaggtgcctgttttcaacccaacaaatctcaatccattccttcgggaataagaagaaggaatccaactacctcttaaaagacagccctgaaactcatgatgaagaaagctgatattccagagaacagatacaaaaataactgggaccaatgaccttacccagtgatatcaggtggctgtagttctccaacatcacatccctgtacaaggtcctctgatcaggctgcaggcactcccactcctcctgagagaagtcaatggccacatccctgaatgtcactgatccctgaaaccacaaacacatggattatggtgaaattgaagaaagttgtttcaagacgaaaggagaggaagtgaaggattaaactgcaataaaggagcaatatggaaaatcgcagagtgcctacacattcttcaagaatcctgctgctggcctggtgtggtggctcatgcctgttataccagcactttgggagaccaaggtggaaggactgcttgagcccaggagttggcaaacagcctgggcaacataacgagatgcactccctggaaaaaaaaaaaaaagaaagaaagaaagaactgtcgtggtggcatgtgcctatagtcccagctacttgggaagctgaggtgggagtattgcttgagcctgggagttcaatgctgcagcgaagtgtgatggcactactgcactccagcctgggctacagagtgagaccctatctcaaaaaaaaaaaaaaaaaaaaaaaaaaggtggcagcatacaattgaggaatgccgttaatcctcaagcttactgtggtatcagatgatagcaaaagtattttttcttgtcatgacaaatgatttttataagctgcgtaaaattcaaaataactgacatattagatttagtcatatttttctatttatacatttaagatggtcagagtctctaaggttttcccaaattcagagaatctgtaatcacctaccactcatgccctgaataatctctgttactgcccactgtcctcactgatcactttcctaaaagcctcataaagcagaacaccttgtcacgcttgcagactgaggccactcactatggaattctacctcagctacctagaaagctccagtctgtggaggagtttcaaggtgttcccgagtgtggtcaaatgcgacaatcatctgtaacttatcaaacccacaagaccatgtttccctgtggggaccaactcctccactgttccaacattctttctgaccaaggactgagttaagcacagactgaataacctgctcaaagaaaacatcaaagccagtgggaaaacagaggtacgaataggaagagcactgacttttattttttggtcaccaaacttcactgtaatgggacaaagtggggtgtaagattgtggatcctggccaggcacagtggctcacgcctgtaatcccagcactgtgggaggccaaggcagggggatcatgaggtcaggagatcgagaccatcctggctaatatggtgaaatcccatctctaccaaaaatacaaaaaattagccaggcgtgctggtgggtgcctgtagtcccagctactcgggagtctgaggcaggagaattgcttgaacctgggaggcggaagttgcaatgagccaagatcgcaccactgcattccagcctgggtgacagagcaagactccgtctcaaaaaaaaaaaaaaaaaaaaaaaaaaatcgtggatccttacgtaagaaggttcaggtttaataataacagtcacctaacctaacctgaaagtcaccatatttcaagaagacagaaacaccaacttacatggaccatgtttctagaattacaaaattggtcaatcttcctcgggcttctcccctggaaaacaacaacaacaaaaaggccctaagtcaagctgtgtccgaaagcactagaacgaataaatattttatcctccattcctatttctcaactactcctgctcacacgcacacttccacccttctcccgtcactccctttttccctacacacactctcacaaataaactggcagtgaacaggtggagtgtggatgaaaccaagctctcgcctacatcccagggaacctgcggcggaagcatgaatgccgagcacaggcatttctgccttgaagttgtggcttccagccagtcctccactcttgggataccaatcttggcctaggactgggcctctgatcctgctgtaagcaatcctcctcccctagtccacctttcagagctgagaagggcttgcatcatccaatccagaacctctttgtgaactcaggattgggtgcagtggggcaaggcatgagaactggaaaggatatagacagaattgcatgggcagtgttcagcattctgagttcaccaaaagccagctggggtaagtacagttcagaatagccatgtaatagaatacaaagtaatcattaattgttccagacatatgattaacagaaaaatcaggttacaaagcaggataaacaatacgattacatttgtaaaatatatgtatatagaaatattaagcaaaagactaatagacatcaatacaaaaatttagacaggtatatgcatgctaacagtgcttatctctgtattgtagccccaattttcttctttttgctaaagagtatgtcataattgtgactatgcccaggcatttaacttagaatatataattatattcacacacacacacacacacacatatatacacacatatacacatgtgtatgtatctatatatgtacatatttaaatgtacatacacattttttttcttgcgaggaaattgttctccaaattagatgaaagacatcttttatttagacattttcctttcaacgtggggacaaaaaaaggaaactctactgagctcttgtttttatgtaataaatttgtttccattatttcccaattcttgaccaacactaagatgtctatgtttttctatgtatgttagtacaatttctaaaaaaaattgtctacaagtcttcaactaatttcttgtatgcattaatgatggtcatatttctacatccgaattcaaaaataaaaataaaacagagttaacagagagtgagtacttttaatcataaaaaacaaaaaactgtgcctgtcatgaggatcaaaaagattaatgtgactataacaaataacatcagctagttctgacatcctttagctgtatctcaccaatataattagacattttcattatcaagactcttctctgaatgaacacaatgcagataagtggcatctggaaactacatgagaaaatctgtggaatgtacatcaccatgcttggttcccttcttcaccaaataactcattaaaatatcattttggatacaattcctacagaatgccttacaaaaaccctatcttagtatatgggattcatatacatgtaacattttcttgagtatcattgttcatagcatgaatactgcttaatggtatatcaaatatttttcttttcataattctttatagacatcattttattagctgcataatactttatcacttgagtctagtataatttgcttagtgatttccatattacaggacacttgatttatataagatcatttacagtgtcattccaggtatcacaatcttttgattctagactaaggtttttcaccctaggcactaatgacatattgtgctgtataatcctttgttggggctatagggagggttatcctgtgcacggtacaatgttcagcagtatccctgacctctatccactagatctaagtagcacctcccccatggtgtgacaaccaaaagtttttaaacatcacccccgctgagaatcaatgttctatctagatcaatggatccaaacctcatgggtcacatacagttttgatagtcttatgaaatgatatactatttctccctctaaaacccacattgataaatttccatagtacttcaatacattatttcaagagctttgtggtccccaagaccatacgtggagttacaagaactcagattaagaatttcagtcctacattcttgacaaaaatagaaaaaaaaaaatcctaaaatgtgcatagaaccacaaaagacccaaatagccaaagcagtctggagcaaaaagaacaaagttggaggcatcaaactacctgacttcaatatatactacaaagctatagtaaccaaaacagcatgatactgacataaaaacagacacctagacaaacggaacagaatagagagccccagaataaatccatatgtttacaaccaactgatttttgagacaggtgccaagaacatacaataaggaaaagacagtctcttcaatacatactgttgtgaaaactggggagtcatacacagaagaatgaaattagacccttttctcaaaccattatacaaaaatcaactctaaatggattaaagatttaaatgtaagatcccaaactatgaaacaaatagaaaaaaacgtacggggaaagcttcatgacattgatctgggcaataatttttttttctagaaatgacttcaaaagcacaggcaataaaagcaaacatagacaaatgaaattacatcaagctaaaaaagcttctgcacagcaaagtgaagagactacctacagaatgagagaaaatatttgcagtcatgtatctaataaggggttaatatccaaaacgtgtgaggaactcaacagcaagaaaacaacccaattaaaaaatgggcaaaggacctgataaacacatctcaaaagacgacatataaatggctacagtatatgaaaaaatactcaacattactaatcatcagggaaatgaaaattaaacctacaataagatatcacctcatatgtgttggggtggctattgaaaagacataagttaacaaatgttggtgagaatgtagagaaatgtgaaccattgcacactgttggtgagaatgtaaagtgacacagacattatggaaaacagcatggaggttcctcaaaaaattagaaatagaaccaccatatgatccagcaatctactactggatatttatccaaaggaaatgaaatctgtataccaaagagacacctgcacacccatgtttattgcagcactattcacaatagccaagatatggaatcaatctaactgtctatcaatgaatggataaagaaaatgtggtatatatgcaggtatatatacacaatggaaaactagccataaaaaaagggaaatgctgtcattcgcaacaacatggatgaacctggagaaattcatattaagtaagccaagcacagaaaggcagatgatctcactcatcagtggaatctgaaaaatgttcatataggccaggtgcggtggctcacacttgtaatcccagcactttcgaaagcggaggcgaaggccgaggcaggcggatcacctaaggtccagagttcgagaccaccctggccaacatggcaaaaccctgtctctactaaaaatacaaaaataagctgggtgtggtggcatgcacctgtagtcccagctactcggaaggctggggcaggagaattacttgaacccgggaggcagaggttgcagtgaaccgagatcacgccactgcactccagcctgggcaacagagtaagacactctctctcaaaaaaagaaaacacttgatatcatagaattagagaagagaatggtgtttacaggtcgggggtaatgtgggtgagggagggaagatggtgttggctggggaaatgttggtcaaaggatataaaatttcaggaagataagagaaataagctcaagaaatctattacacaacaacgtatctactattaataactactattaataactattctgtagtgctaagagagtggatattaagtgttctcaccacaaaaatgataactatgtgaggtaatgcattgctaattagctagatttagtcattccacaatgtacatatactataaaacatcatgttgcacacgataaatacatacaattttatctgtcaatttaaaaagaacttctgtcctagatcatttgagcaactcactcattttcttactatgcaagcagcaatcacaatgaatcacatattcccaatgctcctgtcctatagaaagtcaagggaaatgacctaaaatgaccacacgaaaacaaaagctaaaacattaaacatttattattatatgcctagcactgctctaagaggttttagagtattaattcattctaatgttcattacaagcctgagaagaccagaaacggacagaacaaacattccaacccagatactctggatccactcccctattcttaaccgcaacagcgtactgcctctcacagttcacacaaatagcccaaaatgcaaccggaactgccgaatctcacagagatctggcaagtattacaattatcatctcatggactctcccgaaaaatcctgactctggttgataccaatttctgtgcaatcactttccgattcctgaaagcctcacagacgaatggaaatcacccaaccatctccattcttccctacttggaaaaggaggcctgtaaagagtcagaaacctggcgtgtgattccacaaactaatcttcttttcaaagcagagtctaaaataaagctttaatataaacctctggaggactatttttataccagcttagaagaagagagcgtacaggaaggtgtgaacgatttgccaaatggctctgtgaatattaaatggcaaggtggggagcgggcggggtggggaacggctcgctgggaggcggcacaatgggagggggcaagaatcaatttgcatattctcctgaaattcactaaaaatttacaggaacctctatattctaaaatcaaaaacgcatttcttgaacaaatacaaagcacaaactcacccttgacttaagtgtgcaacaataacgctctcatcctcctctcggtccttcttttggataataatacgactggagaaggatacggcaagcgtgagactccaggcttttcttggagcgcagactaagtttgaaagcaccctccatggccacaacttccctcacttcgtacgaaatgagaaggaaataaaaggaggaggaatcggtctgagttcgaagctggttcctggggacagatctctgagggacgctgggttctcaacatgtagctgccctcctgggggaccctcaagaggcacttccagctctcatattcccaccccgagtccagatctgcgccttcttgtgcaaagcttcattctcggttcaatatctaacctccctactggggacattttcattcctctgctgcagcctctgcagctttgaaggggaaagacggaggaagcagcaggagcctagtaccaccggcacagtgacactcacacagccccagcaaaacgcactgcgtccacacgccgtcccggtcctgtgcacagggcctcacgcacacactcacacagtcccctccgtcactcaagatcgcgcaatccccatcctttgatgcccgcgcacacgcacgcctaaggatctggcagattccgtctgcgccccgggttcctcctctgagcgcctcgctctcgcccacccgcactgccgggtcggtcaggttcgagtcccagtccacgaagacctcccgcagccaccgatttcttcctaggacgtgaagaccttacccagctaggtcgtcaaccccaggagacaggaagtggaaccgctaattccggtgcggtggcctctgggaaatacagtcctgagcagaaagaacctcagaagtcttggtctatggtctgttcaggttgatcccagcatacattgggggctcctaagggacccgagcctaatggatttgtgggagttccagaccgtggggtgcagaggttgcggccacgggcgagaatccccatctgagaggagcgttgctgttttcggtgcgtcagggtaaattaccttttctctctatgcaaaagaatgcaaatgagcagaacttttaaagaagaatttaaagtaaaattacgtcaaaatgtagctgctttgacctcttcgtctcagatccgagcataggcttcccctttgtgctatttgaagggacttaggataaatttgaaaagcctgaactaaagaaatggttggagagactccgtctcaaaaaaaaaaaaaaaaagaaagaaagaaagaaaaggaatcgttggttttatactagaagaggaagtgtggtttacatgagagatttcagaatcaaatatacttgattcttcaagacaatcttcctgttatctggagagaaaaacgtgattcaggacggcatggaaacagataaaagtacacagagaattacttgccttatcttgaaggatgaataattaacacattttcttaaaacagtctaaataaatgccaaagggggtttgtttttcgtaggaaaagcttgatttcactgttgtaatctagcaacattgaactttcaaaatgatttttgtagtttcctatgctatataaagcggaaacgtggaataatgaagagcaaaatgtcttttcattcccgactgtgacagaaaacagatagcaagataacaaacttaattggatcaatgatcacattaagtgtaactggtctaacaccttaacttaagaaggttgtcaggttggattttttttttaaaagtcagacccaaatacgtgctacctacaggtaatacttaaaatataaaagcactaataggttaaaagtaaaaggatggaaaaatatataaaatcctaacactagtcaaaagaaagctggagtggctatattaaaaacaaagtgacttcaccaaaaagactatatcagggataaagaaagttacatcatcataatgatgaaggatacagttcatccagtggaaagaacaaacctaaattatgctcttaatacagcttctaagtatgtgagtaaaaacctgttagatcaataaagtaacagacaaatccacaattataatcagatatttcaacatatctctcttggtaattgatagaactaatgcagaaaagcaacagggtatagattatctaaacaacatatcaacctgcttgatctcatttacacttctggaacactcttctcaaagacagtaaaattcatcttaggtggacaggagacactttccagcgtataccatattctgggccataaagcaagtctccataaatgagtaaatggactcaagtcatacaaagaatgtttttgacaaaaatggaattaaattagaaatcaataacagctcactatatattgtccaaagtagtaaaaatttgaaaatgtatgaatactatgataattgaaattatataatgtttgaaaatttcctttatgagtcataattttctgttatatcctaaagggtaaacaataacatatttgcattaaaacaaaataatgtttttgtagtaaggaaaaaattttaagctatctatattgactatgcattaaagagcagaataattatttttggtatatattccaatgctttaatcaatttcttagccagtatcaccatatttttaaggattttttttgacacagtctattatttttaaattttgataaaattgtatgtaatcctcaatgctggactttatggttaataaacttgaaattatagctaccttcaaatggcgcttctctgaacaccataccttttaaattgagatatatactctgcatatactaaggtaatcagaagtcttagaatatagccaatgaaatggaaaatatcctcatgagtattgtgaatatggaatattagattgcaaatattttagcagttgatgtattttgccttcacagtacatttctacttttttttttgccacttagtctaggaagggtacatttatttaaaaattattcctaaagccaaacaaattggctcaatttatgatacctttgaatgttaagccaaatttaggtgttacggaaacataaaccttctcaattgcattccattctaacacaaattgtaaatgtatccagttagaaatgggagcaccatcaaaagactactgccatagctgaagaaagtcctatgcaaaattgaagaatttcaaaattaaatcctgtatataatacgttagttcatgactttatttattcagtttcttccttaatttgtaggactaaatcccattgtcttcatgttggcaagttctgataactgaaattctgttgaatttctatactgaataggagtaaggatagatgatatcactgttttgtgccaaatcaacagaatcttaaacaaccaaagggttaaagaacaaataaaaagagaatttagaaaacattttagataaatacaaatttactaaagttcatgagatgcttactgctcagggaaaaatttatagctctacatgcctataaaaaggaggaaagatgtcaaatcaatgacctaactgtatacacttaggaattagaatatgaaaaatagaaaaaaaaaaaaagcaaaaccaggagaagaaaggaaataataaagataaaagtgaggttagattaaatagaaaatagaaaaataatagagaaaacttacaaaattaaaagctggttctttgaaaagatcaaaaaaagtggcaaaactgtagcaggactgaacaagaaaaaagagaaaacatcaaaattactaaagtcagagctgaaagtggagacattactaaacttacaaaaatgaaaatgatgatagaagaaaattataaacaattgtatgtcaacaaaataacctaaatggaaaggaaaaagtcctagaaacacacaaactatcactgactcaagaaaaaatagaaaatcttaacaggagtgatgtcagcaagatagaagaatgggactttccagcacttagctctcacagaaacatcaatttaaacgtatatctatgcatgaacaaactttcacaggagctaaagaatccaagtagctcactcagaggggatgggaatgaagcagctagtagacaactgtctctgagacagcaaaaatgttggatttagcaaagatctgaaagcagctattttaattatgttcaaagaactaaaacaagccatatgtaaagaatttaaagaagagtatgacaataataccctgccagagactatcgacagagagatggaaattattactgcaatgaaagaaccaagtagaaattctagagttgaaaagcacaataactgaaatgaaaaattcactagaagaactcatagcagatttaacctgaaaaaagaattagtgaacttgaaaataggtcaagtcaataaaattatgcagtctgaagaacagaaagaaaaacagaaggaataaaaatgaagaaagcatcagaggcatgtagtacaccatcaagcaaaccaacatacatataagaggagggtcagaaggaaagaaaaagaaaaaatgcttgaaaaataatggccaaactctctgtgaagttgatcacacacatgcacacacacctacatttacaagaatgtgaacacactccaagtgggataaacccagatattaatacttaatcaacatgtctcaaggagagctaccccagagtcaaattgtcagaagccaagaacaaagggaaatcttgaaaacagcaagggaaacattattcatcatataaacgagattctcaacaggactactggctgacttctcatcagaaacaacagagaacaaaaggcagtgggatgagattcaaagtactaaaacaaacaaaaacaaaaaacaaaacaaaacaaaacaaaaacaaataaaaccctaccagtcaaccaagaattctatatccagaatattctctctcaaaatatagataaaataaagagaattgcagataaggactgaaagcctttgttgctagcagactttcctaataagaaatattaaagttctttagaatgaaggtgatggtcactggaatccacacaaagaaataatgagcactgattaaagtcattacataggtaaataaaagataatatacacttttacttttttattttaactgattaaagataactgcataaaaccataattatacaattgtattattttgttcataatgtataaagttgtaatttgtgtcacattcatattactatgatagcacaaaggaagggagctatattggagtaaactttctgtatactattgatattattttatttattttgatttttaaaattttatttctaattttttgtagagacagggtctcactatattgcccaggctggtcgtgaactcctgggctcaggcaatccttccacctcagcctcccagagtgctgggattacaggtgtgagccaccatgcctgacgactactgttattattttagcaataatctcaattagatttttttaagctaagatatacattagttctttttaaaagctgaaaacagacggaaaacaaaaggatggaaaaagatacaaatagataccatacaaatggtgatcagaagagaataggaatggttatactaccatcagacaaaacaggctttcaaaatgttactaaagaaaaagagatttatttaatgataaaagggcaagttaattagaaaaatataactacaatgaacgtatatgctcctaaaaacaggagactacatacatgaaaggaaaactgacaaaactgaagagagaaaatgacagctcaacaatagaaggtggagattttaacactctattctcaatacatacaacaactagacagaaaatctgcaaggatatagaagacttaaacaacactacaaactagtttgtcttaactgatggttggttgaacactcaaccaacaataaaatacatactcaacatgcaacattttctaaactaaacaatatactagacttatatatggcaaatcataatattttttataagtaagtcatgctaagtatattctctgaccacagtgaaaataaaattagaaatcaaacactgaggaaatttgggaaatgtaaaaatattttgaaattattcaacacattgttaaataccccatggatcaaagaataaattataagagaaattaggatgtattttttattttacttcctaaaaatagagatgagaatctcactatgttgatcaggctggtctcaaactcctggcctcaagcaaccctcccatcttggcctcccaaaatgctgggattaccggcatgaaccatcgcaccttgcctagaatgtatttttaataaaaacaaaaacaatccaaatttttggagcagctaaatatgtttttatttttagctttaaatgcctatagtgctagaaaagaataaagatgtaaaatcatttggtagacttcaccagtgaaaccatgtagtctttggcttttctttgttaggaggtattagattgctattcattcttcttactggtcataggtatattcagattttctatttcttcattattgagtcttagaaaggtgtgtgtttctagaaacttttccattttgtctaggttatcaaatttattggaataccgttgtaaaaagtactcttgaataatgctttttattagtatacagttggtaggaatggaatgttccctgtttcatttctgatcctagttatttcagtcttcctctcttaatcaatctgcctaatggttctcaattttgttgagcttttcaaataaccaactcttagttttactaattttctctattttttattctctaatatgttaatctcaagcctaatattttcatttccttccttctactagcttcagatttagtttcttcttcttttctagtttctaatggcataaagttagggggctgacttgaaatctttcttcttttttaatgtaaacactaacagctataaaattcccttaacactgcttttgctgcatcccataaatttggtatgttgtgttttcattttcatttacctcattttcatttgttttgatttcttctttgatccactagtttagagtgtgcttagttttcatatacttgtggattttacagttttacttatgctattgaattctagtttcaatattttaacattatgacttcttctgtggcctaagacatagtttatcctggataataatccacatgcacttgaggaaaatgtgcactctgctattgttgagtggaaatgttatgtatatatgtgtgttaggtccaattggttcaagtcccctatttccttatttatcttctgtcctgttcctctacatattattaaaagtagtgtattgaagtctcctactattattgcatagatgtctatttcttccttcaattctgtcaatgtgtccttcatatattttggagctcaggtgtttagtgtatatgtatttgtaattgatatatcttcttggtaagttgacccttttattatatattctttgtctcttctaaccttttttaacttatagtatattttgtctgatattaatacagccatgcccactctttttaattgctgtttgcatgaaatatcttttttcttcttttcactttctttttgtttgttttttagacggagtctcgctctgtcacccaggctggagtgcagtgacacgatctcggctcactgcaagctccgcctcctgggttcacgccattctcctgcctcagcctcctaagtagctgggattacaggcgcccgccaccaagcccgactaagtttttgtattttcagtagagacggggtttctccatgttggtcaggttggtctaaaactcctgacctcaggtgatccgcccgcctcggcctcccaaagtgctgggattacaggcgtgagccactgcgcccggcccatcttttcactttcaaactatgtgtgtccttagatctaaagtgactttcttatagatagcatttagttggatctcgttcatttatcgtctcccaatctatgtcttttgattgccaagtttgatccgtttacatttaaagtaactattgataaggaatgacttatttttgccatgttgtttttttctatagttcacccagtcccacatttcttttcttactgccttcctctgtgttgattttctataataacacatttaaattttttattcattgtatttttgttattttcttaatggctgctgtagggtttattatatacatcttagaatcagcttcagaataatactaacttgatcccagtgagatatataaatgttatttatatagttctaatctatcctacttttcaattctattattgttctacattattatgtctacacatgctacagactcaaaaatacattattatacttattctgtataggtttatgtctattaaggatggaatagagtatatatatatttatatggtatttttgatatatagctttttatttactatttctacttctttttatttgttcctatgaattctagttactatcgcgtatcatttctttactccaatacaactctgctgtcatttacttcctttatgctgctattgtcaaatatattacatttccatgtcatatggccaataatacaattatgtacatattatacaattgctttttaaatctattaagagaaaaaagtaaaagaaatgtgcatttatgctgccttttataattaccattttgtgtgtgtgagacacagagtctcactttgctgcccaggctggagtgaagtggcatgatctcagctcactgtaacctctgcctcctggtttcaagcgattctcctgcctcaccttccgagtagttgggactacaggtgcacaccaccatgcccagataatttttgtatttttagtagagacggggttttgccatgttggccaggctggtcttgaactcccaacctcaggcaatctgcccgccttagcctctcaaagtgctgagataccaggcatgagccactatgcctggctataattacctttaattataaatattaattttgttctttttaaaaatgtgattttaaattttcatgtgttttacttgctttcagtattaataactttttttttttttttttacaatttctcatatggcagatctgggagggctttgtttcaccttttttttgaaggcagcattactagaaataagatcatggttcacaaagcttttgtcctttgagtactttgaatgtatcatcccactgccttcatcccctccattgtttctgatgagaagtttgctgttaatctattggggtacccttgtggcacattgtttttctcttacagctttcaacatttcctttcacttttaacatttttactatgacgtgtctgtttgtggatatgtttgcattcattctgttcacagtttgttgagatgcttgtgagtatagattaatgtttgttcaataaattgtggatgtttttagccattatttctttgaatatttttgtgcttctctttctcctcaccttatggtattctcattacatgtacactggtgcactgaaaggcgtcctgaatttctctgaggctctgtttatatttctttgttctattttctcatcctatttcttcattttcctattctattttctaatgggaagatggaattgaggttgcataatttctattgatctatttgaaagttttctaattcttctgccagctcaaacttatttagcccttctaatgattttttatattagttattatagtcttcaactccagaatttacatttggttcatcttatgatttcctttattgatattctttatttgatgagacattatctttgtattttcccttactgctgtgaatatatatataatggctaccttgaagtttttgtcttttaaatctgatatctgttccctgtcaaaggccatttctgttgcctgcttttttcctgtttataagtcgaacatttcagtttctttgtatgtcttacaatttcttgttgataagtggacatattaggtaacatactatagcgattctggatactgattccctgtccccttcttcagagtggtttttgttgttgttcttcagagtggttttgttgtttgttttgttttgttatttgttttctgctttgactaagctattttagtgaagtagcttgcagtgggaagcattttgttgttcttcagagggtgcagccttggacatatgcagagttactcgtagttatttgttttgtgttttcactaagctattttagtgaaatagctggcagtgggaagcattttgttgctcttcagagggtacagccttggacatacgcagaatataccctggtatggttttaaacaggagtctctttgaccatctttccctgatctctctgttaagatgtttgtctcctttggtattatttctagcccactaggctccactggcttctgtctgatcagtctactgttctccacaagtccttggagcattaattactaagcagtttggtataatttaagccaagcagggctagtttttgaggccagtctttaaggtttcttttgaccttagaagggctccttagctgtgtcttcccctggaattacctgattaactagctgacttacggttcatgttgtttttaattaagggaagtttctgacactgtttcaaataaattccattcttcttgagagagcttcagagctctattcttatacactgtctctccctctggacaaaatctctgaaccaccattctgggcaatgggctgggtggtagccattttgtttctcttgtgaaacctctgccttacaagcaagctgaggcaaaggcaatcagggcccaaatctgagttcactgtgcctgggtagagcttccaacctatgggtgggagcgggggaagcaatggagccccaagcctcttggttgcatcaccaggaatttagcctcttcaactgagaggaggtgggaataagaatccctggaagcctgaccctcctgttgttataaaacttgattgagagctggagccgcataatcttggcagcatccacccagtgtgaagcttccatcaaactgagctgtgaagacaagaagagagtgggctgtgtcttaaataccacgaattctcactgctcttaccaagttttagtagactttgttgttagatatttcattcactgtatactctttgcactctttcagatctcaaatagtaaggttttaaaaatagtttttgttttttgtttttttttcacttttacttgtcttgctggtaaatgagcctgcagagtctccctatcctatcatccagaagtggaacttcatacagtcatctaacaatcgtttagcattttctgtcatctcattttggagaatcatagatgtggcagaaatacatattcttgaagaaaaaaaatgtctcccttacaggtactgtggttttaatagggtgtgggataagtacatgacaacatgcatgggatagatgctctgctctctgcagatctgtgcttttgagctacagaacatagaagaatatattgactgttcttagtcttaatatatgacaatctaggtgtatcatttaagattaaatttggttgtgagtaaaatagtaaaactgcatcaaattaaagtggataaaacaagataaggttaatttctctgtcatataatatggatgtaagcctgatattgtggccttgctccaaaccaatcatgaattcttccactgctggcatcagaatggtatgagctctcagacttacacagaactggggaaaatcgtaaagaatttctggatatccctcacccagatttctcaaatattaatatattcagccagctgtgttttaagagaggtttccagaactgccaaaaatattcacttacatcctactggccataagttatgtcacatgacaacatcttggaaaaataaatgcagtgcttactctagatagtcatagccaactgttaataaaaattactgattctataatcctggactctaatctgtaataacagactctgacccgctggggaatccaaggagaaagtttcactttcagcaattacaaataaccacagtgcaaccctagagaccacacttgtgcagaagactcatagaaatggaatggtatcctagaaattagaacacacaggtctctcatcccccatactgcaaactggattatcataataccctataaaaggatgacagaaggccaggcttggtggctcacgcctgtaatcccagcactttgggaggccgagacaggcggatcacgaggtcaggagatcgagaccatcctggctaacacggtgaaaccccgtctctacttaaaaaaaaaaaaaaatacaaaaaaaattagctgggcatggtggcgggcgcctgtagtcccagctactcgggaggctgaggcaggagaatggtgtgaacccaggaggcggagcttgcagtgagccgagattgcgccactgcactccagcctgggcgagagagtgagactctgtctcaaaaaaaaaaaaaaaaaaggatgacagaaatcttctgtccagtttttttctggagaatctatgaacattcaaaatattatctattgtcggctgggcaagatgtctcacacctgtaatcccagcactttggggtctgaggcgggcggatcacttgaggttaggagttcatgaccagcctggccaacatgctgaaagctgtctctactaaaaacacaaaaattagctgggcgtggtgacaggcatctgtaatcccagctacttgggaggctaaggcaggagaatcgcttgaacctgggaggcagaggttgtggtgagccacgactgcaccattgcactccagcctgggcaacaaaagcaaaactccatctcaaatataaatctatccatctatctatctatctatctatctattatccattattgaatgttcttcataacactgctcagaaacaccatgacaaatttgaatcagaccaatatctccaaaaatgggcaagcagattaatgtgtcatttcaggcaggccctagcaggagataaacttctcagctatcaccatacataaaaccttataattcaataaaatatcaaatgcaaacaagagcagatcatagaaatgtaagttgagaaaaatcagagtgaacttctgaccttacaatgacattttctactctgaaactattaaaagaattctaacaaaaccagcatcttcttccatacctgtaactgccatgtgcacccatagcagccagatttcttggtctcaaaggctcttttcctctaaatagaaccaggacaccctacgagggtactgaatcatgggttgattccatgactcaggacaagaggcatggggaacatggaccaacaaagaaggatcagtctaaaacatcttcttaggacctgaacacaatattcatttaaaaaaaaagaaaaaaagaagtcaaaaaaacaaatgtaactggactcctactggctacacatcaaattatcataattactacagatgcttctcaacttatgacagcgttatatccaaataaacccatcacaaattgaaaacatcatatgccaaatgtgtatttatgacctacaatattttcaacttaacatagccccatcttagtttgaggagcatactctgactgagtatgtcttagtccattttgtattgctacaaaagaatatctgaggctgggtgattaataaagaggtttatttggctcactgttctgcagaatgtacaagaatcatggtgcagcatctgcttctgctaagggtctcaggctgcttccactcatggcagatgatgaagggagagccagtgtatgcagacatcacatggcaagagagaaaacaagagggtgagggaggaggtgccaggttcttttgaacaaccagctctcacaaaaattaacagagcgatagctcactcacccctcaatccagagagggcattaatttattcatgagggatcttccaccatgacccaaacaccttccattaggccccacctccaacactgagatcaaacttcaacatgagatttggagggacaaatatccaaactatagcaacatatcacttttgtaccatcataaagctgagaaattgttagttgacattgttggggaccatctctataatagttcattggaacaagtctgttaaaaatcatgttcatactgatacacaaaacatgtaattatcatacatctagtatcatgtcacactcaaaagataaatggttataaattttacaaaaggaggctgcagttaggaatgtttaatttactgtttgttgatagtaggtgagaaagaactgttcatatgccttttttccaccaacttgatgtttgtttagaaggtatagttacctatttgtattgatctgtaaaagcaagatggaacaaatacagaaaagtttgagtaagccagacacttttggaaggggcagtgtactagaaatgggaaaaatgtatccatattaacggctactcgtaactcctatgaatcaggtaaaaggagggccaaataaaaatcagtgctagggagtgaaggtcagactcacaaaccaaataaatgaaatattcaatacatttcacaataagaaaataccccaatgtcctaatgaaaaagaataaaaacacatactcgatcctcttctcctaggagatgaaatatattgttttaaaaatgagttactccaataagatatgaataagcaatatataaatatataataaacataacagaccagttagatatataatagacaacagattaaatactgctgactaagcacaacttaaggggattatataattaaatgtatccaaaaaaaccattattgaattgacctgtcactttctaatacatctttgttactaaaaatttaagcaacttagtaaccatgactctgggtcatctgatatcataatgtggttcaaggtccaccaatcttctgtttctttgattgtatttccttgtttcaggacaggtaaaaatgttaatatcataataaagaccaaactgtccaattaccaaaactgtgaagcagcaacaatgtcaaagaattacaaataaaaggaataagaattttttgaaaagcaactaaaattgagaaaattctttttataagtgaattcagtatgttcactgagcttgtaagcaaggaaatagtctatggatgccttctctgcttttaaaagtagtaggtgatttttaaatttttacataattggtttgtaactttagcaaatattttaaagtgttttattatgtttgcaaagggactgtgacttccaacttagaaatcccaagattgcatgatgatagagtttcactggaaggcctcctgggatctcttttttatgacaattcttaatgagataccagaatgtgcaatgacccataaaggagttgtgctgggttaatacccagggaatctgttgagttcaaaaaagaaagtcaaagagaatcaatatgaaaaagatgaaagtggaaataaaaaataggaacatgagactagaaagccaggttttaaatagcctcgttttgtaagatttataagatcactgcattaacaaaacctgaaaaatgtttagaaaattataactttacctatgattatagatacaattaaatgttaagaaatagaattaagtagtctatcaaaagcataataatctgataaggatatattcacaaaaagaagaaagctatcaatataaattatcattttatagatttttaaatgcactggaataaaatcacaaaggattattattgatctttaaaaaagttaatctctctaattcatgatgccacaatggtatcatgttttatagcttgatttaaaggcttaatttttttcaaagtttatcaacagctcacataccagccatgatgtataggtgctgatgataaatgctgaacaaaaacaaggttccagacaaaataatcttggctccctgaataaactagagggtgctaattttgtactgaatatactgtcagccttatcacacaagttgacttatgttgacaaccttaatggcattcatttttgaatagtctatttcaattttcattttgtattcaatccacagctaaaatacacatgattataaatattcagaggtcaaagtctctccatagattatttatgcactacaaattagatctttacaatggacttatggcggttaccagcttacccaaatgatcaaacttagtttcactaatgcaaggacctgtacttaaatgttttctgacagtgaaatatgccatacaaatagcctacaaagtattcttccccaaaatgtttaatctgacctaacagagcctctggactcaaattcccttgtacagaatatgcaacaaagagaacaacactaaatgacactataaagaaagaaatctaaacacatagacaattttcctgggctaatcaaaattcaatctcattttttaagaatgaggagatggaccaggccttttcaaaactatcaagcagatagtcagggcctgtgaagtgtgccaaagaaataatcccctgcactgcaggccatacatttcaatctctgtatctttaacctccttgttaagtttgtcttttccagaatcgaagctgtaaagccacaactcattcttcaaatggagccccagatgcagtccatgactaaaatctaccgcggacccctggaccggcctgctagcccatgctccaatgttaatgacatcgaaggcacccctccagaggaaatctcaactgcacaacccctactacaccccaattcagcaggaagcaattagagcagttgttggccaacctccccaacagcacttgggttttcctgttgagagggggtactgagaaacaggactagcaggatttcctaggccgattaagaatccctaagcctagatgggaagttgaccacatccacctttaaacacggggcttgcaactcagctcacacccgacccatcaggtaagaaagagagcccgctaaaatgctaattaggcaaaaacaggaggtaaagaaatagccaatcatctattgcctgagagcacagcgggagggacaatgatcaggatataaacccaggcattcgagccggcaacgactaccctctttgggtcccctccctttgtatgggagctctgttttcactctattaaatcttgcaactgcaaaaaaaaaaaaaaaaagaagaatgaggagaaaggagaaatgttctaggtcagtggctctctaactctggttggtatcacaatcacctggagaaataataaaaaacatagaggcccagaattataagctagggcttaagcctctgtagctttactaagtgccactgttgattctaatacctaccaaaatttgagcgcctacattcataggatttccaggctacaatacactaaagagagataaccaaatgcaatgcagattctgcaatggattctcctttgaatatgaatagctgtaaaagatggtttggaagccaatgaagaaatctgaaaatggaatgatattacagaattatgaatactttccttaacggtaattatggtacaatggctatatgatattgtctatattgtcttcatgtttggttgatacacacgttgattaaataaagggtaaagtgtcatgatgtctaaaacttattctcaatggtacaacaaatatacaaaaaataaacgtgcaaattgttaacaattttgaatctaggttggggtatatgattgtatatttgactattctttcaaaacccacaacaagtatcaactaggtttaccatcttttatgggcagaatttgtggtatcccaaagcaattacaatagcaacatcaaaaatcactggtcattgatcaccatgatagatatataacaatgaaatagtttgaaatattctgagaattaccaaaatgtgacataaagacatgaaatgcacacctgacgttgggaaaatggacctgatcgtcttgctcaccacagggttgccacaaaccttcagtttgtataaaacacaataactgcaatgcacaattcagcgaggtatgcctgtatctggtaaattatttcatagggagtacattgtgaacatgacaactaccctatattcctcattcaaagactttctcacaagaattatcttctccgaactctaaggtatttagtgtggctataaaacgccccacattccttacactcaaagatttctcagaagtatgaatactcagaagttgagcaaatcccaggccatgatgaaagttcttcacacattcttttatgttcacaagatttctcatcaatatgagctctctggtgttgagtaaatttttcgtacacagtgaaggcttgtccacactccttattgtcacaaaatttctaactattctgaattttctgatgttgagacagctgatcatccacagcaaatgctttcccatattccttacattatagcgtttctcaccagtatgaattttaacatgttgaacaatgtttgagctacaactaaaggtcttcccacattctgtacattcacagggtttcataccagtatgaattctttgatgtgcagtcaggaccaaactaaatctgaaagttttcccacactccttacattcatagagtttctcaccagtatgaatactctgatgttgaacaaggtttgagccactattgaaggccttcccacatttctcaaattcaaatggcttctcgccagtatgaatgacctgaagtccagcaagctgtgtcagaaaactgaaggcctttccacattctttacattcaaagggttttttaccagtgtgaatttggtaatgttaaataagtggtaatgatatctaaaggtcgtcctccactccttgcatacaaagagtttctcactggaatgaattttctgatgctgaataacgtttgaaccacaaatgaagcctttcccacaccccttacattcacatggttttacaccagcacgaatactctgatgttgaacatggtttgagacacgattaaaggactttccacattccttacattcaagatgccttctcacctgtgtgaatgttcttatggcgattaagctgggtgggaagactaaaaacctttccacattccttacattcaaagggtttctcaccagtatgcaatttctgatgtcgaataagttgcatatgaagtcgaaaggctttcccacactccttacattcaaagggtttctcaccagtatgcaatttctgatgtcgaataaggtgcatatgaagtcgaaaggctttcccacattccttacattcaaagggtttctttccagtatgaatacttcgatgttgattaagatttgaaccacgacgaaagaatttcccacattccttacattcaaatggtttttcacctgtgtgagttttctgatgttgggaaagttgtaggtaaagtctaaaagccttcccacactccttacattcatagggcttctcaccagtgtgaatactctgatgttgaacaaggcttgagccacgattgaaggccttcccacagtcttgacattcaaatggcttgtcaccagtatgaattcgagaatgttcaataagttggcaatgatatctaaaggccatctcacattccctacatacaaaaggtttctcattggaatgaattttctgatgctgaataaggtgtgcaccacgattaaagcctttcccacactccttacattcatatggttttataccagcatgaatactctgatgttgaacaaggtttgagctacgattaaaggacttcccacattccttacattcaaacggtttttcacctgtgtgaatgttcttatggcgattaagctggttgagaagactaaaggccttcccacattccctgcattcaaagggtttctcaccagtatgaatcttctgatgtcgaacaagctttgtcagaagagtaaacgcctttccacattctttacattcaaagggtttctcaccagtatgaatttggcaatgttcaataagttggtaatgatatcgaaaggccatcccacattccttacatacaaagggtttctcattggaatgaattttctgatgctgaataaggtgtgcaccacgattaaagcctttcccacactccttacattcatatggttttacaccagaatgaatactctgatgttgaacaaggtttgagctacgattaaaggacttcccacattccttacattcaaacagtttctcacctgtgtgaatgttcttatggcgattaagcagggtaagaagactaaaggcctttccacattcgttacattcaaaaggtttctcaccagtatgaaatttctgatgtcgagtaaattgtatgtgaagtcgaaaggctttcccacactccttacattcaaagggtttctctccagtatgaatactctgatgctgaataagatttgcactacgactaaagtatttcccacattccttacattcatacggtttatgtgtattgcaaataagagaagcatgaggagtatgagtaggcagtttttcatagctgatcatcttttgattgatatttccttcttgatatccctgtagtccctcaaattgtctatattctgagtcatttctaaaataaaaggcctcaatgccaagagttgtacttatttgctttataacctgtttgggtaaatttacttcagaggtatcattttctggagatactttctcaggtccatattttaactccaaatctgaaagaaatgaagaaagcaaacctattttattttcgtataacacacatgcatacaaagtccttttgtcaactgaaaccatcaattcaaaccaataaaacctttattgattttattagccaaaaccaacaaagttggtagatagaacctttctcatatcacttctgtttccagtggaagcaaatgcacatctgagccagcctggttatgtacatgtaaaaataggaaaatgaaccacagaagattgaacctaactaggtcaactatctgttgaaacatattgatatgttctataggacttaagaccatgagacccatagtttcatagtcagtaattagaatgtccaggatacaatccaaatatactggcatatacaagaaaatttcaactcacattggaaaagaaaatcaacagcagcattctgccaggggcctggggatcaccccacccctgcttaccacaagaaccagcacgtacaactggggggcctaaggtcaggtccagcagacccagctctgtgcccaagtccccaagcacaccatctggggacctggggatcaccctgatccatctaccacctttgctacctaagcactcatcacagaggcctaaggtcagacacatacaacctgctgtttcctccacaactggtacccacctgtactcacaaccggaagttctggggactggcccacccagcccatcatagtcacctccaacactaagcacttactgcttgggagccagaaggttgtcctgttcactactactaccatcacccatgccacacttgctgcccaagaatccaagaacccatccacctacccagcataccactaccactgccagcactatccaaactacgaggaggccaaagaatcaacgtgcctagacacactaatactagtaccagcatacactatgctggggccccaaaacaggcacatctggactgccactgccaccaccagagcccaaggacttgcctaccttgtgtcctcgtgctaggccattcttgcattaaaggaatacctgagactgggtaatttacgaaaaaatgagtattaactggctcatggttctgcaggttgtacatggcgctagcatcttctcagcttctggggaggctttaggggccttttactcataaaagaaggcaacacaggacaaagaatgtcacacagcaagagaaggaacaagagagagaacaagaagaagtgccatatacttttaaacaaccaggtcttgcaagaactcacttactattgtgaggacagcaccaaggggatggtgctaagccattcatgagaaatccacccctatgatccaattacctcccaccaggccccatctccaacactggggattacatttcaacatgagatttagaggggaaaatatctaaactatatcactcctcatccccaataaaacttcaccataccctccactaaccatcacaaccaaagccaaggaagaaatcacagacaccaaaggcactgtttacagccaaaaaaaaaatcataacactacataacaacactactgcacacgcccagaatcaaagcgaaaatgccctatccaaccctattaaccataggtacatctttaggaaaaaagcctcccctacaaaagcaaattcaaaaaaatgagaataaacacaggaaataacaaaaaaaaaaaaaagagaaggaaacttgacatctccacaggaacataataattctccagaaacattccaatgggagaaaaatgctatatcctagcaaaagaattcaaaataattatattaaagaagctaagtgagatacaagagaattcggaagaacaatacaaacaaatcagaaaaaaaaaactcaggataagaagaagaaacttaccaatttcattataaaaaagaaccaaacagaaattctgaaactgaataattcattgaataaaatataaaatacattcaaaatcttcaacaacagactagatcaagtagaagaatctcagaacataaagccaattcttttgaaataacccagtcagacaaaaatagaaaaacaaaaaaagaagaagaaacaaagaccctatatgggacatcataaaacaaccaaatatttgaaattttgaggtcccagagatgaagagaaaaaataaaggaaagaaaatctatttaatgaaataacagctggcaactttccaattctagcaagagatgtagacatccagatacaggaagctcagagatacccaaatacataacaacacaaaaaggtcttctccatggcacattatggtcaaaatataaaagtcaaagacaaagagagaatactaaaaacaggaagagaaaagcatctagtcacttacaagggaactctcattagccgaacagcagatttctcaacagaaagaaatgagagagaatgaaatggtatattcaaaatgttgaaagaaaaaacttgccagtcaaggatactatcctcagcaaattataaaacataaatgaagaagaaataatctttcccaggcaaaagctgagggcagaccagctctacaagatatgcttaagagtcctacacctagaagtgaaagaatatctgccattgtgaaaacacacaaaattataaaacccactgacacagcaaacacaaataagcagaaagaacccaaatgttacccctatagaaaacaaccaaaccacaatgatgaaaaataaaagagaaagaaaggaacaaaggatacacaaatcaactagaaatcaattaataaaatgacaagaataagccctcacatatcagtaatcacattgaacgtaaatggattaaacttttcatctaaaagatatagatggaatggattttttaaaaagtgacccaattatatgctgccaacagactcatctcactggtaaagacatatatggattgaaagtaaaggaatggtaaaagatattccatgcaaatggaaaccaaaagtgagcaggaatagctatatttatatcagacaaaaaagattttaagtcaaaagcagcaaaaaagagacaaagaagatcactgtataatgataaagggatcaattcagcaagcggatataacaattctaaacatactataatcccaacaccagaacacccagatatataaggtgaatattattagatcaaaagggagagagatgtattccagtgcaataatcattggggatttcaacaccccactctgaattacacagatcatctagatagaaaattaacaagaaacattggatttaaacttcacattagacaaaacaggcctaacagacatttactgaacatttcatcaaatagctacaaaatacacattttctcattagcacacagaacattctctaggatagaccatatgttaggatgcaattcttaacaaattcttcaaaaccaaaattatatcaagtcttttctcagacatggaatagaatgagaaatcagtaacaagaggaactttggaaactgtacaacacatgaaaattaaacaacctgctcctatataaccactgggtcaagaaagaacataaggaggaaattaaaaaatttcttgaaacaaatgaaaatcagaatacaacataccaaaacctatgggatacagcaaaagtactgctaagagcaaagttgatggcaataaacacctacattgaaaaagcagaaagatttcaaataaacgatctaatgaaattagggcagaactaaataaaatacaggctaaataatacaaaagatcaatgaaatgaaaggttgttttttaaaaaacataaataaaattaataaaccactagctagactaaccaagaagaaaagagaagaaataagcaaaatcagaaataaaaaaaggagatattaccactgacaccacagaaacagaaaagatcatcaaaatagaaaagctgaacaggccaatgagtaatgagattgaattagtaataaaatgtcacccaaaaaagaaaactccaggactgatggcttcactgctgaattctatctaccaaactctcaaagaactaattctcctcaaactattccaaaaaatttcagagaagggaattctccttaactctttctatggagctggcataccatgaaaccaaaaccagacaaggaagaaacaaaaaaagaaaatagttctagcctaaagtcacatgaatgcctatgtttattgtagcactattcataatagcaaagacatggaatcaacctaaatgtccatcaatggttacctggataaagaaaatgtggtacatatacaccaaggaatactatgcaaccataaaaaagaacaagattatgtgcagcaatatggatggcattggatgccattatcctaagcaaattaattaaggaacagaaaaccaaatactacatattctcacttataaatgggagctaaacaccgagtacacatggacacaaagaacagaaaaacagacatcagggcctacttgagagtagagggtgggaggacgaagatccaaaaactacctattgggtactatgcttattaccggggtggtgaaataatctgcacaccaaacccaccacaacatgcaatttacccatataaaaaacccacttatgtaccccttggacctaaaataaaagttggaaaataaattaaaaataaataaataaatggtgctggaaaactggatatccgtatgtgatagaatgaaaccagacccctatttctcaccgtatacaaaaatcaactggaaatggattaaagacttaaatgtaagactcaaaactataaaacaactaaaagaaaacataaaggaagtgcttcaggacattgacctaggcaaaaattttctggttaacactgcaaaagcataggcggcaaaaacaaaaatagacaaatgggactatattaaactaaacgcttctgcagagcaaaggaaactatcatcggagggaatagacaaaattaaatgagagaaattatttgcaaactatttctctgacaagagactcaaataacaggaaaaaaaaaaaaaatccaattaaaaagttggcaaatgggctgggcacgatggctcacacctgtaatcccagggctttgggaggccgaggcgggcagatcatctgaggtcaggagttcaggaacaacctggccaacatggtgaaaccccatctctactaaaaatacaaaaattagccaggtgtggaggtgggcacccgtcatcccagctacttgagaagctgaggcatgagaattgcttgaacccaacagacagaggttgcagtgagccaagatcagattactgcactccacactgcaggacagagcaagattccaccttaaaaaaaaaaaaaaagtttaccctgggaaaaaaagagggaacttactccactaaaaggggaaggaaataagagaacagaaattaggtgattagtaaatgatgaagttccttggtgatggcttctgctgtaatctttatttccttcccaggtcttgggcatttttatccaacaggacttgggtcactgaagaaagcttttcaaaccacatctcaagtgtatgactcctttctgagcacatgtccaggacaatgatggcttccccccgcctgctttaccctcacttacctggataccgtctgcttgtttctttccttacaaccatccagggctctttctcttgctctagtaacgtaattacatctggtttagaaatggaacttcctgcttaaaagaaacgacacatgtagaatttttttaatacagatttttttttttcaaatctttgtgacctgcttaaacttacaataaattacaagtcaaaacaatattgaaaagagacttcagataagagtgagaggttgagtaagagaactcttttctaactatgttagaaaaggacttcctttcatttaaactcagaatcttatcccttgaaaagaggtataactgaatggttgagagcaggaaacttcaatccagactgccaggttcaaatcctatctctgctactcactagcagtatgacctcaggtaagtcacttaaactctgtccttcagttttcccaactctaaaatggggatgatacaatacctattttataggattgatactaagacaaaataagttatatatatgcaaaatacttctaacattgcctgatgtacagtagcacaaagtcaagaattattgtttattattgtcatttattttgcatccttagacatttatagctcactcagtatattcactaaatgaaaatacataaactccatggtctgaaactttcaactgcaaaacaatggaatgtttattgaaggaaatgaaatgcattccctttagtgttaaatgaatttctgtcaacccaatcagtatacgtaaataacagacatttttgtttgtttgtttttggttttgagacagggtctcggtctattgcccaggctggagtgcagtgatgggtacagctcactgcagcctcaacctcccagtgatcatagaggtttctctgatagaaaaattcaagacactcttctccttacagatgggttagaaaaacaaaaacaaaccaacaaacagaaaatctacagtaattctgagatcaaacataatatgaaatctggttcttagacaatatctttcaatgaatgtacaagatttcaaattcagccccatggtcatgaagagagaggcaattacagagaggaccagcgtaacgaaggaggccattgtggagtaggcaagatgcaggggctccagggaggtgcctgttttcaacccaacaaatcccaatccattcctttgggaacaagaagaaggaattcagccacctcttaaaagatagccctgaaattcacggtgaagaaagctgatattccagaaaatagatataaaaatagctgggactcaacgaccttacccagtgagatcaggtggctgtagttctccaacatcacatccctgtacaaggtcctctgatcaggctgcaggcactcccactcctcctgagagaagtcaatggccacatccctgaatgtcactgatccctgaaaccacaaacacatgtataatggtgaaactgaagaaagttgttttaagatgaaaggagaggaagtgaaggagtgtagtgtaagaaaaaagcaatatggaaattcacagagtgcctgcacattcttcaagaagtctcctgctggctgagtatggtggcttatgcctatagtcccagcactttgggaggcagagataggaggattgcttgagcctagaaatttgagaccagcctgggcaacataatgatatcccatctctgcaaaaattaaataagtaactgtgtgtggtatcacgtacctgtagtcccagctactcgggaggctgaggtaggagtattgcttgagcccaggagttcaaggctatagtgaactgtgatcacgccactgcactccagcctgggccacagagcaagactctgtctcagagaaaaaaaaaaaaaaaaaaaaaggtggcatacaattaaagaatgttcttaatcctcaagttcattatggtatgagatgacagcaaaagtattttttcttgtcatgacaactgatttttataagctgcattaaagtcaatagaactcacatattagatttattcattttttttctatttatacgttgaggatggccagggcctctaaggatttccccaattctgagaattttttattttttattttttttctgagacagaatttcactctgttacccaggctggagtgcagtggcacgatcgcagctcactgcaacctccacctcccaggttcaagcgattctcctgcctcagcctcctgtgcagctgggattacaggtgcgcaccaccacaacaggctaatttttttttttctttttttagaagagatggggtttcaccatgttggccaggctggtctcaaactcctgacctcaagtgatccaccacccacctcggcctcccaaagtgctgggattgcacgcgtgagccaccatgtccagccagagaatctgtaatcacctatcattcatgccctgaattatcttctccctgctactgcccactgtcctcacctatcattttcctaaaagcctcataaagcagatcaccttgtcacacttgcagactgaggctactcactatggaattctaccttagctacctggaaagctctagtctgtaaagtttcaaagtgttcccaagtgtggtcaatcatctgtaacttatcaaacccataagaccctgtttccctgtggggactgattcctccactgttccaatattcttcctgaccaaggtctgagcacagagcacagactgaataactttttcaaagaaaacatcaaagccagtaggaaacagaggtacaaataggaagagcagtgactttttttttttttgtcaccaaccttcactgtaatgggacaaactggggtgtaagatcgtgaattctaggtacgaagcttcaggttaaataataacagtcacctaacctgaaagtcaccatatttcaaggaaaagagagaaatacaaacttacatggaccatgttgctagaattacaaaactggtcaatcttcctcgggcttctcccctggaaaacaacaacaacaaaaaggccacaattaaagctgtgtctcaaaagcaaataactattttatcctccgttcctatttctcaactactcctgctaacacgcacacttccacccttctcccatcactccccttgcccccacacacactctctcacaaatagctggcagtgaacgggtggagtagggatgaaaccaagctctcgcctgcatcccagggaacctgcggcagaagcatgaatgccgagcacaggcatttctgccttgaagttgtggcttccagccagtcctccattcttgggatacctatcttggcctaggtctggacctctgatcctgcccttagcagatcctcctcccccagtcccacctttcagagctgagaagggattgcatcatccaaaccagaacctctttgtgaaatcaggattgggtgcagtgggggaaggcatgagaactggaaagcatatttgcactggcagtgtttgcaccaaattgcactgacagtgttcagcattctaaattcagcaaaagccagttggttaatacagttcagaacatccacttaatagaatacaaagtaaatattaaacgttcaagatatatgattaacagaaaaatcaggttacaaaacaggatagataatatgattacatttgtaaaatatatgtatatagaaatactaataaaaagactaacagacattaatagaaaaaaatttagaaaattatatacatgttaagagttctcctctgtgtattgtagctccaattttcttctttttgcttaagagcatttcatggccgggcacggtggctcacacttgtaatcccagcactttgggaggctgaggcaggcagatcacgaggtcaggagatcgagaccaacctggccaacatggtgatacctcgtctctactaaaaatacaaaaattagctgggtgtggtggtgcatgcctataatcccagctactcaggaggctgaggcatgagaatcgcttgaacccaggaggcggaggttgcagtaagctgagatcgtgccactgcactccagcctggcaacagagcgagccttcatataaaaaaaaattgtaactacatccaagcattaacttggaatatatatagttatattcacacacacacacacgtgtgtgtatatatatatgtgtgtgtgtatatatatatttatatatatatatgtgtgtgtgtgtgtgtatgcatctctatatatggacatatataaatgtacatacacatttctttcctatgaggaaacttctccaaattagatgaaagacactttttatttagatatctccctttgaacttggggtgggaaatcagcatactctaatgaactgttgtttttacttaacaagtttgtttcctttattttccaattcttgaccaacactaagatgtctatgtttttctatgtatgttggagcaatctctagaaaaaattgtctacaagtccccaaccaatgtcttgtatgcattaatgatagtctatttctacttttgaagtaaaaaataaaaacagagttatcaggaaaaaaacctgagcctgtcacgagattcaacaaaagaggttaaagtgactacaacaaataacatcagctagttctaatatcctttagctgtatctcaccaatataattagatattctcattatcaagattcttctttgaatgaacacaatgcagataagtggcatttgcaaactatgtgagaaaatttgtgaaatatacaccaccatgcttggttcccttcttcaccaaataaccaattaaaatattattttagatataattcttatagaatgccttcagatagaattcttatagaattcttatacaaaaaccctatcttagtatatgggattcatataaaacataacaatttctttttggggggcaggggtggagtctcactctgtcacccaggctggagtgctgtggcctgatctcggctcactgcaacctcagcctcccaggttcaaacaattctcctgcctcagcctcctgagtagctgggattataggcgcctgccaccactcccggctagtttttatatttttagtagagacaaggtttcaccacgttggcaaggctggtctcaaactcctgacctcaaatgatctgcctgcctcagcctcctaaagtgctgggatttcaggtgtgagccaccgcgccccgccccatgtaacattttcttgagtattattgttcatagcatgaatattgcttaatgatatatcaaatatttttcttttcataattccttatagacatcattttattacctgtgtaatactctatcacttgagtctagtatgattagcttaatgatttctgtattataggacacttattttatacaagatcatttacaatgtcattccagatatcacaatcttttgattctggactacagtttttcaccctaggcactactgacatattgtgctggataattcttagatgggagagtggggagagctatcctgtgcataacacaatgtttagcagcattcctgacctctatccattagatctaagtagcaccctccccgacagcatgacaaccgaaagtttctaaacatcaccccagctgagaaccaatgttctatctagatcaatggatccaaacctcatgggtcacataaatttttttgataatcttatgaaatgatacactatttctccccctaaaacccacatttataaatttctataatacttcaatattttatttcaagagcttttggtccctgagaccataaatggagtcacaggaactcaggttaagaatttctgtcctacattccttacagaaacaggaaaaaaacaaaaatgctaaaatttgtatagaaccacaaaagacccaaatagccaaagcaatcttgagcaaaaggaacaaagttggactcatcaaaactatctgacttcaagatatactacaaagctatagtaaccaaaacaacaaggtactgacataaaaacagacacatagaccaaagaaacagaatagagaggcccagaataaatccatatatttataaccaaccgagttttgaggagggtaccaagaacatacaatggggaaaagagagactcttcaaaaaatactgttgtgaaaagtaggtatccatatgcagaaaaatgaaattagacccttatctcaaaccattatacaaacatcaactctaaacagattaaagacttaaatgtaagatcctaaactatgaaacaaatagaagaaaacatagggggaaagctctgtgaaactgatctgagcaatgattttttttgggatatgacctcaaaagcacaggtaacaaaagcaaaaatgaacgaatgaaattatgtcaagctaaaaagcttctgcacagaaaaggaaacaatcaacaaagtgaagagacatcttgtagaatgagagaaaatatttgcaaccatatatatgataagagattaagatccaaaatgtatgcagaagtcaaacaactcaacagcaaaaaaaaacctgattaaaagatgggcaaaggacctgaacaggcacatcccaaaagaagacatataaatggccaacagtttatgaaaaaatactcaacatcactaatcatcagggaaatgaaaattaaacccgcaataagatattagctcatacctgttagggtggctactggaaagacaaatgttaacaagtattggcaagaaaaggggaacgcttacacactgtgggtgagaatgtaaatgggcacagccattatggaaaacagtatggaggttcctcaaaaaattagaaatagaactaccatatgatccagccatcccactactgggaatatatctccaaaggaaatgaaatctgtatgtcaaagagatatcagcatacccatgtttattgcagcattattcacaatagccaagatatggcatcaacctacgcgtctaacaatgaataaatggataaagaaaatgtggtatatatgcaggtatatttacacaagggaatactatttagccataaaaagcaggaaattctgtcatttgcaaaaacatggatgaacctggagaacatcatattaagtgaagtaagccaagcacagaaagacatatgatctcactcttcagccaaatctaaaaaagttgatatcatagaagtggagagtagaatcgtatttacagatctggggtaatgtgggtgagggaggaaggagggcagtgttgactggggaaatgttggtcaaaggatacaaaatttcaggaagataagagaaataagttcaggagatctattacacaacagggtatctccaattaataacaatattctgtagtcttgaaaaatgctaggagggtggatattaagtgttctcaccacaaaaatgataactatgtgaggtaatgcattgttaattagctagatttagtcattccacaatgtatacataccataaaacttcatgttgcacatgataaatacatacaattatatctgtcgatttaaaaagaaagaatttctgtcctagatcatttgagcccctcactcattttcttaatatacaaccagcagtcgcaatgaatcacatattcccaatgctcctgttctgtagagagtcaaggggaatgacttaaaatgactacacaaaaaacaacagttaaaacatattaaacattattatatgcctagcactgctctaaggggctttacgatattaattcattctaatgacagaaccaatattccaacccagatactctggatccactcccctattcttaaccacaacagtgtactgcctctcacagtacacacacacacacacacacacacactcacacacacacgcctaaaacacaactggagctgccaaacctcagagagatctggcaagtattacaaatatcatctcatggactccctggaaaaatcctggctcttgttgataccaatttctgtgcggtcacttttccactaccgaatgcctcacaggcaatggagatcatccaaccatctccattcttccctgttttgaaaaggaggtctgtaaagaccaactgatgtctagtgtgtgattccacctaaacactaatctcctccttcccaaatatgggtctaaaatggagctttaatattaactactggaggtgtatttctataccagcttcgaaaaagagagcgcacaggaaggtgtgaacgatttgccaaattgttttgtgactattaagtggaaaggtgaaggagggggcacgaatcaatttgcatatccccctagtttcactgaaaatttaaggggaaatctcaatattctaaaatcaaaaacgcatgtcttgaacaaatacaaagcacaaactcacccttgactttaggtgtgcagcagtaacgctctcatcctcctccaggtccttcttttggataaaaatacgactggagaaggatacggcaagcgtgagactccaggcatttcttggagcgcagactaagtttgaaaacaccctccctccatagccacaatttccctcacttcacacgaaataggaaggaagtaaaaggaagaggaatcgattcaaccagtacaaccagtttggagctggtttctggggacagagctctgaggacgctgtggttctcaacatgtagctgcccccctggggaacactcgggggcacttctgcgctttcttgtgtaaagcttcattctcggctcaatatctgacctccctactggggccattcctctgctgcagtccccgcagctgtgaagcggaaagagggaggaagcagcaggagcctaggggcaccggcacagtgtcactcagcaaagtgcgctgcgtccacacgccctcccgggcctgtgcatagaacctcacgcacacactcacagtcccctccgtcactcatgatctcacaatccccctcctctgatacccgcgcacacacacgcctggggatccggcagatcccgtctgcacccccgggttcctactctgagcgcctccccctaggccacccgcactgtcgggtcagtcaggctggagccccaatccgcagagatctcccgcagccacagatctcttcctcagacgtgaagaccttaccccgctatgtcgtcgaccccggagaccggaagtggactggcgcggtggccgctgggaaatacagtcccgaacagaaaaagcctcagaagccttgagctgtgatccgttcaggttgatcccagcatactatgggggctgacccctaagggagccgagcctagtggattcgtgggagttccagcccgcggggtgcacaggttgttgccatgagcaaggatccccatgtgagaagagcgtttccctctcggagcgtcagtataatttactttttctctccatggagaatgcaaatgagcagaacttttaaagaagaaagaagaatttaaagtaaaattatgtcaacatgtaggtgctttaactcctttgtctcagaccccagcgataggcttccacttctctgtgctatttgaaggggacttaggataaatttgaaaagcttgaactaaagaattggttggttatatactaggagaggaagtgtggttcacattggagatttcagaatcaaatgtcctggattcttcgagacaatgttcctgttatctggagagaaaaacgtgattcaggacgacatggaaacggataaaaatacacagataattacttgccttatcttgaaggatgaataattaacactttgttaaaatagtataaacaaatgcaaaaaagggcttgcttttcctaggaagagcctgatttcactgttgtagtctaacaatatttaactttcaaaatcatttttctagtttcctatgctacataaggaggaaacatgtaataataaagagcaaaacgtcttttcattccagaattgtgacagaaaacaaataagatgattaactcaaccatatcaataatcacattaaatgtaaatggtctaaacaccttaatttaaaaagattgtcagattggattttttaaaaagtcagacccaaatgtgcatcaatgatagactggattaagaaaatgtggcacatatacaccatggaatactatgcagccataaaaaggatgagttcatgtcgtttgtagggacatggatgaagctggaaaccatcattctgagcaaactatcgcaaggacagaaaaccaaacaccaaatgttctcagtcataggtgagaattgaacaatgagaacacttggacacagggtggagaacatcacacaccggggcctatagtggggtcgggggagggggaagggatagcattagaagatatacctaatgtaaatgacgagttaatgggtgcagcacaccaacatggcacatgtatacatatgtaacaaacctgcactttgtgcacatgtaccctagaacttaaagtataataaaaaaagataattaaataaataaataaacaaaaagtcagacccaaatgggtgctacctacaggtaatatgttaaatgaaaagcactaaaaggttaagagtaaaaggatggaaaaatatacaccatcctaacactagtcaaaagaaagctggagtggctttattaaaaacaaagtagactccggacatagactattaccagagataaagaagggcataataatgataaaggagatagctcatcgagtagaaaaaaacaaacataaattttgctcctaaaagcaaagcttctaagtatgggaagaaaaatctattagatcgaaaaggagacagatccacaattatagtcagatatttcaatatatctctcttggtaattgatagaacaaacacagaaaagcaacagggtatagcagatttgagctacatatcaacttacttgatctcatttatatttgagaacactctcctcaatgacagtaaaattcatctatgtggacaggggatacttaccagtataggccatattctgggccataaaacaagtctcaataaatgtaagaggattcgagtcatacaaagcatattctttgacaaaaatggaattaaattagaactcaataatagctgaatatataatatattgtccaaagtagtacaaattcgaaaaggtatgaatactaaggtaattgaaattatgtaatgtttgaaaaattcctgtattaattataatattctgttatatcctaaagggtgaaacaataacatatatacgttaaagcaaaataacaattttgtagtaaggaaaaaaatttttaagctatttatgttgactaaacattagaataaagcggagaataattatatttaagtatattctgatactttaatcgatttcctaaccaatatcaccattctttttaagtattttctttcaatgtggtctattatttttaaattttgataaaattttatgcaatcttcaatgttggactttatgtttaataaactcaaaattatagctaccttcaaatgactcttctctgaacaccatactttttaaactgagatatatactctgtatatactaaggtaaccagaagtctcagaatatatccaatgaaatggaagatatcctcacaagtattgtgaatattgaatatggaaaaattagattgcagttcatattcttgtagttaatgtatcttgccttcaaggtacatctctttttttgccatctcttttttgtaccctaagaagggtacatttctttgataattatctttacaaggcaaacatattggttctatttatgattcctttgaatgttaagccaaatttagatgctgcagtaacataaggcttctcaactgcgctccattctgacacaaattgcaaattgatccagttaaaaattggagcatcatcaaaagactattcccatagctgaagaaattcctcagtaaaattgaagaatttcaaaattaaatcctgtatgccatctgatatttcatgacttaattcattcagtttctttcttaatttgtaggactaaatcccattgtcttcatgttggccagttctgataactgaaattcagttgaatttctatgttgaataggagtggtaagagaagacatctttgtcttgtgccaaatcaacacaatcttaaacaaccaaaggattaaagaatgaatacaaaaatttagaaaatattttagataaatacaaataaaaacacatgttaccaaagtttatgatatgcttattactaagagaaaaatttatagctctacatgcctatataaaagaagaaagatgtcaaatcaacaacctaactgtacaactttaggaattagaacatgaaaaatagcaaaacaataaataaatagaagacaagaaaggaaggaaataataaaaataagagtggagttaaatagagaatagaaaaataatacagaaaaattacaaaattaaaagtggttctttgaaaagatcaaaagaagtagcaaaatcttagctggattgactgagaaaaaaatagaaaagactcaaattactaaagtcagaggtgaaagtggagacattactaaccttacagaaatgaaaatgattatagaagaatattataaacaattgtatgccaacaaaataaactaaatggaaaggaacaattctttttttgcaatatttatttattattatacttttaagttctgggatacatgtgcagaatgtgcaggtttgttacataggtatacacgtgccatggtggtttgctgcacctatcaacctgtcatctacattaggtatttctcctaatgctatccctcctctagtcccccacccccgacaggccccagtgtgtgatgaggaacaattctttacacaaactgtcactgattcaagaagaaatagaaaatcttaagaggagtgatgtcagcaagattggagaatgggactttccagcacttagccctcacatcaatttaaacatctgtttactcatgaacaaactttcacaagagctaaagtatccaagtaagagattagagcaccttgctgtagcacagaaacaggaaaagatacattaaagaggctaagaaggagcgttttgcattacctagtccatcactctcccaagcccagcccagaaattatagtgtggtgagataccctccgtgttagaggatgaataaagtgaacaccaactttgctgtggaccctggcagcaggactactccactgaaacccaatgaccagctggcccccttgacccaaactccaaggtggcaccctcagctccaggcacaaagctggcacccacagatccaagctccaggataacccccatggatacaggctgtcagcctacccagcccctgtggctccagtctctaagctggctcccatggtcctacactctgacaaacccagggttcaaacccactccaccgcatccaatatccagacctggcccaggagaccccaagtgccaggccagctcctagagaccaaagctttagaaccacacctaaaaacacaggctccaggctggcctccatatccctaggacagcacccacagcctcaagcttcagactgacccctgtggaatccagacccaaatatgccccagaccagacccaagctccaggctggttcttgtgaccctatgctccagtggacccagggtccacgcctgcccaagcggatcctggaagcagggtgacccctatgagctcaagaccaaggcatattatgggcctatgtccagaccaccccagcaccaggtcaacctctgtggacccagacttcaggctggttcccatggacagtcctcaggcctatccatttgttgaccctggcaccagaccagcatgtctgataacttcagcagtaatcccacccacaaacttctctatacagcccacccaatatctctgatgaagggctttcactaccaaagctagtctgtaaagactagaagggatgcctacttcttcaaatgttcaacaccaaagcaagttcacaaagatcatgaataattaagaaaacatgacaccaacacaaatcaaaataaaccatcagtaaccaactctaaagaaatgaacatttacaaaatgcctggcaaagaattcaaaatgactgttttaaagaaactcagtgagcaaacaagagaatacagataaacactaaacaaaatcaggaaaatgatataggaacaaaattagaagttcaaaaaagagatagaaaacatagcaaatttttgcaaacaaaaattctggaactaaagaacacaataacagactgaaaaattccatagaatgcctgaagagcagacttaagcagaataaagaattaatgagcttgaagacaggtcatttaaaagttaaaagacaggccaggtgcagtggctcacacctgcaattccaaaactttgagaggccaatgtgggagaattgcttgaggccaggagttgagaccagcatgggcaacatagtgagaccttaattctacaaaacaaacaaaattttttaatttaaaaaaatttagctgggcatggtggtgcagagctgtagtcctaactactcaggaggctgaggcatgaggataactcgagcccaggagtttgaggctgcagtgagctatgttcatgtcagtgtaccctagcctgggtgacagtgagactctgtcccaaacaaaacaaaacaagctaaaaggattaaaaatgactataactacaacaatttgcctatgggtacatgatatatacaagatacaaattatactttggaaggccgagttgggcagatcacttgaggtcaagagttcaagacaagcctggccaacatggtaaaatcccttctctactaaaaatacaaaaattaattgggtgtggtggcatttgcctgtagtcccagctactcaggaggctaaggcaggagaatcacttgaaccctggagacagaggttgcagtgagctgagatcatgccactacactccagtctgggtgatagggtgagactctgtctcaaaaaaaataaaaaaggtacaaattatgacatcaataatgtaaaatatgaggagagaagaaagtgtagaatttttttttttttttgagacagagtctcgctctgatgcccaggctgcagtgcagtggtgcaatctcggctcactgcaagctctgcctcctgggttcatgccattctcctgcctcggcctcccaagtagcttgggaccacaggtgcccaccatcacacccggacaattttttatatttttagtagagacggggtttcactgcattagccaggatggtctcgatctcctgacctcgtgatctgcccgcctcggcctcccaaagtgctgggattacaggcgtgagccactgcaactggccaaagagtgtagaatttttgtatgcagttgaagttaaattgttatcagcttaaaataggctactacaattataagatgttttaggtaatccttatagtaactacaaagaaaaatacctacagtaaatacaaaaaaagacaaagagaaaggaatcaaagcatatcactacaaaatatcatcaaataacaaaggaaaacagcaagggagaaaaatagaacaaaggaactacaaaatagaaaacaattaacaaatggcagtagtaatgaataattactttaaatgcaaatggattaaatttgccaatcaaaacacatacagtggttgaatggataaaaaaaaacaagatccaataatattctgcctacaacagactcagttgtaaggacacacataggctgaaattgaagaattggaaaagatatttcatacaaatggtaaccagaagacaccagtggttgatgggtgcagtggtatattcctgtagtcccagctactcaggagtctgatgtgggaggattgcttgagctcaggagttcaaggtcagcctgggtaacatagcaacacccatgtctattaaaattttttaattaaaattgaaaaaaacagagaacaagggcagctatgcctatatgagactaaataaactttaagtcaaaaaactgtcacaagacataaagaaacattattgtatagttataaaggggtcaattcaataagaagatataataattataaatatatatgtgcccaacaatggagcacccaaatatatgaagcaaatgttaagagaactgaaaagagaaagagataacaatacaataatagtagaggacttcaatactctactttcaaccattgatagataaaacagacagaaaatcaataagaaaataggggactttaacaacagtagacaccaaattaggcataataaacatatatggaacatttcacctaacagcagcagaatacacattcttctcaagtgcacatggaacattctttggaataggtcacacgttaggtcacaaaacaagtctaaacaaattcaagaagattgaaatcatgtcaagtatcttttccgacgacaatgaaataaaactagaaataacagaaagaaatttggaaaatgtacaaatatgtggaaactcatacactactgaacaaccagtgggtcaaagaagaaatcaaaagggaaatcagaatatatattgagatggccaggcacggtggctcatgcctgtaatcccagcagtttgggaggccaaggtggctagatcacgtgaggccaggagtttgaaactagcctggccaacatggtgaaacctcatctctactaaaaatacaaaaatttgccgggcgtggtgttgcatgcctttagtcccaactacttgggaggctgaggcacgagaatcacttgaacccaggaggaggatgctgcagtgagccaagatcatgccactgcaccactacactccagcctaggtgacagagcaagatgctgtctcaaaaacaaacaaacaaaatatatatatacgtatatatatagaaagagagagagaggggtgggggaagggagagagaaatacaaacggaaacacagcataccagaagttattggatgcagcaaaagtgcttacaagagggaagtttatactataaatgcttacattttaaaaaaagaaaaaaatgtcaccaataaataacctaacaatgtacctcaaggcctacggagagaaaaacaaacaaacaaacaaaaaaaactggacctaaaattagcataaagaaggaaacattaaagatcagagcagaaataagtgaactcatgaccaaaaaagggttaataaaattaagagttggcttttctgtaagtcaaaattgacaaatctttagctagactaaggaaaaaaaagagagaaaactcaaaaaataaaatcacaaataaaagagtagacattacaagaaatgccacaaacaaaaggattagaagagacaactatgaacaattatatgcaaacaaactggctaacagaaaaaatagataaatttctagaaacatataatctgccacgaccgaataatgaagaaatagagcctgaatagactaataacaagtatggagatcaaatcaggaatcaaaaccctacaaagggaatcccaggaccagatggcctcacagctgaattccatgaaacatttaaaaaagaattaacatgaattattctcaaactcttccaaaaaattaaagataaaggaatgcttcaaaactcaccttataagtttagcactgccctaatacctgatactcccatcacaagcagctagtaaaagaacaaatcaagccaaagaatgtataaaaggaagtaccacatataaaagcagaagtcagtaaaatataaaacaaatatacaatagataatgcaatatcggaatttggttcttttaaaatatatatataatttaaaaacctctagcaaaatgtatgagagagagaggagtgtaagagggagagaggaaaaggaaggcaggaagaaagggagggagagagggagggatagaaggaattactaatatcagaaatgataaatgaggtctgaatacagactctgtagacattataagccctcagaaataatgccgcatatctacaaccatctgatctttgacaaacctgacaaaaacaagcaatggggaaaggattccctatttaataaatggtgctgggaaaactggctagccatatgtagaaagctgaaactggatcccttccttacaccttatacaaaaattaattcaagatggattaaagacttaaatgttagacctaaaaccataaaaaccctagaagaaaacctaggcaatactattcaggacataagcatgggcaaggacttcatgtctaaaacaccaaaagcaatggcaacaaaagccaaaattgacaaatgggatctaattaaactaaagagcttctgcacagcaaaagaaactaccatcagagtgaacaggcagcctacaaaatgggagaaaattttcgcaacctactcatctgacaaagggctaatatccagaatctacaatgaactcaaacaaatttacaagaaaaaaacaaacaaccccatcaaaaagtgggcaaaggatatgaacagacacttctcaaaagaagacatttatgcagccaaaaaacacatgaaaaaatgctcatcatcattggccatcagagaaatgcaaatcaaaaccacagtgagataccatcccacaccagttagaatggcgatcattaaaaagtcaggaaacaacaggtgctggagaggatgtggagaaataggaacacttttacactgttggtgggactgtaaactagttcaaccattgtggaagtcagtgtggcgattcctcagggatctagaactagaaataccatttgatccagccatcccattactgggtatatacccaaaggattatacatcatgctgctataaagacacatgcacatgtatgtttattgcggcactattcacaatagcaaggacttggaaccaacccaaatgtccaacaacgatagactggattaagaaaatgtggcacatatacaccatggaatactatgcagccataaaaaatgatgagttcatgtcctttgtagggacatggatgaaactggaaaccatcattctcagcaaactatcacaaggacaaaaaaccaaacaccgcatgttctgactcataggtgggaattgaataatgagaacacatggacacaggaaggggaacatcacacattggggactgttgtggggtggggggaggggggagggatagcattaggagatatacctaatgctaaatgacgagttaatgggtgcagcacaccaacatggcacacgtatacatacgtaacaaacctgcacattgtgcgcatgtaccctaaaacttaaagtataataataataaaattttaaaaaaagagaattaaggtaaaacaataaaaactttttgacatttgacaatttagttaaatgtccaattttcttgaggaataaaacttgtacaaattgacataagaagaaatagaaattctgaattatccttaatctatttaaaaaaaaggactagtatttttttaattctcccaaaagaaaattccaagtctaaatcgcttcactaatgaatccttctaaacatttaagaaatatcatcagccttagacaaactcatccagagaatagaaaaaaatggaaacatttcccaactcattctaaaagtccagtcattctgatattaaaacctgacaaggatacttcaatttgtatcttataaacataagtacaaaaatctttaccaaaataatagcaaatcaagaaaaatataagaagtataatatatcacaaccaagtagggtttatttaagaaatgcaagggtagcgtaacattgaaaatcaatcagtataattctagtatattaacagaaaatacaatcgtcttggtagactcagaaaaaccacttgatagaagtcagtacttaaaacacagcaaactaagaacaaaaaaagcttccctatttttataaatatcatctaatatgatttgctaaagaactttaaaaagcactttagcaaatcataagatttttaaaaatgatttaaaagttcattttaatcataagatttacaaagaactttagcaaatcataattaatgatgaattattataattaatagtgaaaaattgaaagctcttcttctgagatcagaattaagcaaggatacccattctcaccactttatttgaggctccattcaatgcattaaagcaaaacatatgaataaaaggcgtatcaatggaatgaaaatagacaacctgttgttcctcacagatgacatcatggcaaaaatagaaaataaaaatgaatctacagcaatgtattatataatttagcaatgtcactggatttaaatataaagtacaaatacaaaaaagaaatattatttctatgtaatttctaaatactaccaacaaagaaatataaaatgaaaattttaaagtggtgccatttaaaatatcaagtatctagaaaaaaatctaataaatggtgtagaaaacttctacactagcctagcccagtggctcatgcctgtaaccctagaactttgagaggctgaggagggaggcttgcttgagggcaggaattcaagaccagcttgggtaacatagtgagacccatgtctctacaaaaaatatttagctgggcatgatggtgtgcccctgtagtcccagctactcaggaggctaaattgggaggatcacttgggcccaggaggtcaggctgcagtgaaccatcatcacgcctctgtactccagcctaggtgacagagtgtgaccctgtctcaaaaaaaagactttgggagcctgaggtgggaggatcacttgagcccagattctagaccagcctcagcaacatggtcaaaccccaaaaatgttataaaaattagccaggcatgatggcacacacctgtagcctgggagatcgagattgcagtgagccgtgccactgcactctagcctgggcagcacagcaagaccttgtctcaaaacaaaaacaaaacacaaattgttcctggaaaaaaattaaataagacctaaatcagcaagggatacactgtttatagattgaaatactcaatttggctggatgctgtggctcacacctgtaatcccagcgctttgggaggctaaggtgggcggatcacctgaggtcaagagttcaagaccaacctggccaacatgatgaaaccatgtctctactaaaaatacaaaagttagatgggcatggtggcagccacttgtaatcccagctactcaggaggctgaggaatcgcttgaacccaagaggtggaggttgcagtgagctgagattgtgccactgcactccagcctgggcaaataaaaaaaaaaaaaagattgaaatactcaatttttaaaaaatatcaatccttccaaatagatatatacattaaatgcaaccccagtgaaaattccagcaggattgtttgtgaaaatgtataggctgattccaaaatggaaatggaaagatcagagatgaagaaaagttcattgaagagaaactgaagaaaagaacagagctggagggcttatttaaaagcctttataattaagataatgtagcaatggcacagagttagacaaatagaccaatgggaaagagtagagattacaaaactgaagtaaagacaaaactgtattctcaaaaaagttgtgcctaagtgtcccaaagacatacacaaaaacagtgctgttatgacagtggaaaaatacagtgatatgaaaataaaaactggctgggcatggtggctcatgcatgtaatcccagcactttggaagactgaggcgggcagatcatctaaggttaggaattcgagatcagcctggccaacatagcgaaaccccatctctactaaaagtaccaaaattagctgggcgtgatggcgaatgcctgtagtcccagttactcgggagtctgagacaggagaatcacttgaacctgggaggcagaggttgaagtgagccgagattgcactactgcactccaggctgggcaaaagagcaaagctctgtctcaaaataaataaataaataaataaataaataaataaataaataaataaaaagaaagaaactaaaaatttcaactacatgcaatagtatgtatgagtttcaggacataatgttgagccatagaagtcaggcacaatgagtatatgtactgtgtgattccatttatacaaagctcaaacacaatgaaactaatctacagttttagagatttggatagtggtaacctttgggattagtgactttattatggcatgaaagtagaccctgggatgttggtattactctgtttcttaatctggattttgttttcaggagagtattcaaattatgaaaatgtgaaggtctgtacacttacgatttgaactctctcctttgtgaatgttgcactgaaataaaatgtatgggaaaaaagacataaggttaggtaaataatagcctggaactttcataaatctttttttttttttatcttttgaaaaaagatgttacactgtcactcaggctggagtgcagtggcactatcatggctcactgcagcctcaacctcatgggcaataacaagtgtgatgtcagtctgaggtcggacaggcagttgttgggcagatgtccttgcagaagtattcttttgtgtaagattacaacggcctttgtgcaaggttttggttttgttttgttttgtttagacacaactcaagtgatcctcatgcctcacctcccaaatacctgggactgtagatgcacgacatcttgcccagctcgattgtgagttttgcaaagtcttttctgttatcaggcatacaagctgagaatcccctcttcatagccctcttcatccaactctatttgtcaggatttgtttaacattagtgattccattttgattctggaaactttcacatttccctctttcattcaagatctttctccaaaaacatcactgatcaatcatcctgtagttaaatttttatgtcccttaatgctgacatgaacctgttgcagttgctggtcttgacccacattgagggaagtgattggtgactaggaatcagtgtgaaaaccctttgagccacatttaaacaacaagggagatttcaaaggagtggctgttatgccaagtctacgtggaatccattactaaattctattttgtctgttctgtagttttttggtaatcatctgaaagtgcttggctagcattattttattaggagttgtattctgcaaaattaacaagtaacaaatacaaagtttttaaaagggacaaaaacaaagtaaaactaactgcagtatgacaatcccagtttgcataatggtcttgagacatgaacctaggcttaaagacaactaattgaatatatcaagtgaccatagaaaattagatgagacctattgtaaccatgtggcctgttttcttattttgtgtatatgcgtctcaactttcccagaggaatctatccaggtacagcatgtaatagtattagcaatagtacagaccttttcttatttaaccaatagatgctaaaggatttcttaggttaagatttctgccaggcgcggtggctcacgcctgtaatcccagcactttgggaggccgaggcgggcggatcacgaggtcaggagatcgagaccacggggaaaccccgtctctactaaaaatacaaaaaattagccgggcgcagtggtgggcacctgtagtcccagctactcgggaggctgaggcaggagaatggcgtgaacccggaaggcggagcttgcagtgagcggagatcgcgccacagcactcccgcctgggcgacagaacgagactccgtctcaaaaaaaaaaaaaaaaaaaaaagatttcttaagttaccagcagaagctgttgaacgtaaaatttcatttacaccataacatggtttggctctgtgtccccacccaaatctcatgtcaaattgtaattcccagtgttggaggaagggcctggtgggaggtggcggacttccccctgtcccccttgctgttctcgtgaaaaatgtgtagcacctccccacctacgccctctctctctctctctccagccatgtgaagatgtgcctgcttccccttcaccttccaccatgattgtaagtttccggaggcctccccagaaacagaagcctgtacagcccacagaaccatgagctgattaaacctcttctttataaattacccagtctcaggtatgtctttatagcagtgtgagtgtggactaattacaccattatcctgataagtgaaaacggtaacattaaggggagccttggggaaagctgtttacaacataacaacatcaacttctcctcctgactggtagtttgaatgtctgggcatgacattgggtggtttggtgaactttttgtatggtccatacatcaggcatgaggcttgttcctgaaaattcatctagtttcagcttatagggctttaggaatagagcagattttgttttcagttggagagttgtagccaaatattgaaaaaaattaggagaattcatgaatgggtctagtctataggtagatgacaaaaacttgaaactaatgcacagggctacagtctaatctaataatgggtgtattatagtttttctttgaaacaaagtttttccctctacattgataatataaaaatctcagatttggcagggcatggtggctgatgcctgtaatctcagcactttgggagaccaaggtgagtggatcactggaggtcaggaattccagaccagcctggccaacatggtgaaaccctgtctctactaaaatacaaaaaattagctgggcatggtggcacacacctgtaatctcagctacttgggaggctgaggcaggagaatcacttgaacccaggaagtggaagcagaaaaaacatctcagatttaaaaaccttttgagattaggaagccaaacctaggcagatgttagattttactaagaatcttaaggttgttgggcctgccaggaagtgaccatttttaatcactcattgtaagactgggaactcctgaagctaggcatctagtgtacattcttaaatgtggcatttcagtcaaaaaccttggtaatagagccaatgtttcaaattgcaatctggttataaagaaagcaggtctttattaaacttatgtaaatgaaaacaagaatactcacaagtggtttctgaattttggagaaatcaagtagagagaaaaagcaaatgcttccatgtttgttgacaaaagtacaatatacttatttacaaattgttgtaaactataccttatgaaataaaatgtccttaaatctgggaaacaaaacatttaagtaaaggatgttttaaataaaagttataaaacattatctttatcagttacttaattttatgtaattaattttttgttgttcttgatcccaattaatagtttttttttttttttttttttttttttttaatttatttttttattgataattcttgggtgtttctcacagagggggatttggcagggtcatgggacaatagtggagggaaggtcagcagataaacaagtgaacaaaggtctctggttttcctaggcagaggaccctgcggccttccgcagtgtttgtgtccctgattacttgagattagggattggtgatgactcttaacgagcatgctgccttcaagcatctgtttaacaaagcacatcttgcaccgcccttaatccatttaaccctgagtggacacagcacatgtttcagagagcacagggttgggggtaaggtcacagatcaacaggatcccaagacagaggaatttttcttagtgcagaacaaaatgaaaagtctcccatgtctacttctttctacacagacacggcaaccatccgatttctcaatcttttccccgcctttcccgcctttctattccacaaggccgccattgtcatcctggcccgttctcaatgagctgttgggcacacctcccagacggggtggtggctgggcagaggcgcccctcacctcccggacggggcggctggccgggcggggggggctgaccccccccacctccctcctggacggggcggctggccgggcggggggctgacacccccacctccctcccggacggggcggctggccgggcagaggggctcctcacttcccagtaggggtggccgggcagaggcgcccctcacctcccggacggggccactggccgggcaggggggctgaccccccccacctccctcccggacggggcggctggccgggcggggggctgacccccccacctccctcccggacgaggcggctggctgggcgtggggctgacacccccacctccctcccagacagggcggctggccgggcggggggctgacccccccacctccctcccggatggggcggctggtcgggcggggggccgacccccccacctccctcccggacggggcggctggccgggcagaggagctcctcacttcccagtaggggcggccgggcagaggcgcccctcacctcccagacggggcggctggccgggcggagggctgacccccccacctccctcccggacagggcggctggccgggcggggggctgacccccccacctccctcccggacggggcggctggccgggcagaggggctcctcacttcccagtaggggcggccgggcagaggcgcccctcacctcccagacggggcggctggccgggcggagggctgacccccccacctccctcccggacggggcggctggccaggcggggggctgacccccccacctccctcccggacggggcggctggccgggtgggggggctgacccccccatctccctcccggacggggtggctggccgggctgaggggctcctcacttcccagtaggggcggccgggcagaggcgcccctcacctcccggacggggcggctggccgggcggggggctgacccccccacctccctcccggatggcacagctggccgggcgggggggctgaccccccacctccctcccggatggggtggctggccgggtggggggctgacccccccccacctccctcccggacggggtggctgctgggcggagatgctcctcacttcccagatggggtggctgccgggcggagaggctcctcacttctcagacggggcagctgccgggcggaggggctcctcacttctcagacggggtggttgccaggcagagggtctcctcacttctcagacggggcggccgggcagagacgctcctcacctcccagacggggtctcggccgggcagaggcgctcctcacatcccagatggggcggcggggcagaggcgctccccacatctcagactatgggcggccgggcagagacgctcctcacttcctagatgtgatggcggctgggaagaggtgctcctcacttcctagatgggatggcggccgggcggagacgctcctcactttccagactgggcagccaggcagaggggctcctcacatcccagacgatgggcggccaggcagagacactcctcacttcccagacggggtggcggccgggcagaggctgcaatctcggcactttgggaggccaaggcaggcggctgggaggtgtaggttgtagtgagccgagatcacgccactgcactccagcatgggcaccattgagcactgagtgaacgagactccgtctgcaatcccggcacctcgggaggccgaggttggcggatcactcgcggttaggggctggagaccggcccggccaacacagcgaaaccctgtctccaccaaaaccagtcaggcgtggcggcgcgtgcctgcaatcgcaggcactcggcagactgaggcaggagaatcaggcagggaggatgcagtgagccgagatggcagcagtacagtccagcttcggctccgcatgagagggagaccgtggggagagggagagcgagagggagacggagagcgagagggagacggagagcgagagggagacggagagggagagggagagggagagggagagggagagggagagggagagggagagggagagggagacagagggagagggagagggagagggagagggaccaattaatagttttatgagtccatcagtttctttattagagttcttgaaatttttatttaatccattgatcttaaagctgtcagaaatctgtgttcaagcctggtgcagtggctcacacctgtaatcccagtactttgggaagccacagcaggagaataacttgaggccaggagttcaagtctagcctagacaacatagtgagacccccctctctacaaaaaaataaaaataataaaaccagccaaccacagctgtggacacctatagtcccagccactcgggagtctgagatgggtagattacttgatcacaggagttcatagctgtagtaagctattatcatggcactgcactcaaattgggtgacagagtgagaccctgtcaccaaaaaaaaaaaaagtctgttcaagggtacgtgttagagttgctttcttgaaaagcaattttgaaccatggctgattataaatgtttttagagaagaattcaaaacaattactgtaagtaacaaaaacttagactagccataaaggctcccaatttatcaaaacagaatcacacatcactgtaaaatcatggttattcatttaaccagagtgataatcaaaaggcttcaaaaacaatacagaaaatttcatggatatgaaaactttaaccctttcaaagctcagtttttctaagtaatcaaaaacctaataaagacaacgtaggaattgtcttgataaaatgtaaaatctttggggttttgtttaagaccagttacaaaaagctaaattaaaaacttcttgtattctaattgtttttccttatgggaagcatgtttaggcaagctggaagtcaaatctaatgaaaagggtacttgaattttatcagacacaggaagagtttgtccaaggctatgagtaaacactatattatagaggaatgtaaataagaaaactagtaccttgagcaggggggaaaacatagctcttagtaacagcatgggaagtttcccggttacacgaagcaattcagacacatcaagaaaagccaagagtacagaatcaagttatactggaagaaaacattgcttttcttgacctgcaagataaacatttcagcattgggccataacagtaggattaaaaccgggggtggggggtgagggaagttacagcaatttaaaaaaaaaggttgaatgagaaagttatcacctcagccaagcaaaaatgatataccatttcaaggggagaaagaacagaaggcaatgatgtatgaccatcacatcacatgcagtgagatacagcgaaggatgaacttctcataaataaatctgagaagttccaaaaagaaaacaatttaccttgagaataaaatcacattctgaatgaaaaagatagcatttcgaacctgaaattagggaggttaattatatctcaggaagaaatagaaataatatagaaagatggttgttaaacagatttcagaattaaaaaccagaacctcttgtaattttatatagagcaaatcaatactttaagaaaaacttattctaacatagaggactaaatttttttagttttgcattagtgcttttttttctttttttctttcttttttttttgttttttttttttgtttagacagagtcttgctctgtcatccaagctagagtgcagtggtgccatctcagctcactgcaacctccacctcctgggttcaagcaattttcccgcctcagcctcttgagtagctgggactacaggcacccactaccatgcccagctaatttttgtatttttactagagggagggtttcgcaatgttggctaggctggtctcgaactcctgacctcaagtgatcctcccaaagtgctgggattacaggcatgagccaccatgcccagccagcatttttaatatctgtattagtccatttccacactgctataaagaactacttgagactgggtaatttatttttttttaaaaaaaaggttcaattgacttacagttctgcatagccagggaggtgtcaggaaacttacaatcatggcagaaggtgaaggggaagcaaggcacgtcttgcatggctgcaggagagagagataaagaaagtgccacacttttaaaccatcagattgtgtgagaactcactcactatcatgagaacagcgtggggtaaacccacccccatgaaccaggtccctccacaacacatggggataacaattcaagatgagatttgggtggggacacagaaccaaactgtatcaatatcaaacttcagtctttagaaagactaaattacagccaagttgatcccacacaaaattctttttttttttctattgagacacagtctcactctgttgcccaggctggagtgcagtggtgtgctcttggctcactgaaacctctgtctcctgggttccagcgattctcctcaatcaggcccctgagtagctggaattacaggcattcaccaccacaatcagctaatttttgtatttttttagtagagacagggtttcgtcatgttggccaggctgatctcgaactcctgacctcaggtgatccacctgccttggcctcccaaagtgctgggattataggtgtgagccaccatgcccagccaaataaattttcttttcatgaactttatcacaatttatttagactattgacaacatgcttggactttctactttgtcctatacttcctttttcttaaataaccagtcattttactttaggacaaaaatttaccatgaaaagattctttctcatacaaaattattcttctattttttaacctcccttacgaaaaatacatcttcatattcctaccttttctcacattcctctctcctacttattggttcctttctatcttgtttgatctgagagcctaagctttaaaaacatttatctattcctttttcttttagattactaatttttcaaataagtgttttatcatcatacacaattgttagtcagacaactccaaatttatttatttatttatttttgatacagagtctcactctgtcacccaggcttgagtgcagtgatgcaatctctgctcactgcaatctctgccttccgagttcaagtgaatctcatgcctcagcttcccaagtacctgggattacaggcatgggccaccacactggctaatttttgtatttttggtagagacaggttttgccatgttggccaggctggtctcaaactcctggcctcaagcaatctgcccaccttggcctcccaaagtgctaagattacaggcatgagccatcacacccagcctaaatttgtatttctaaaaggtgtctcggttgttggttaccacggagttgtaattttaaagctattaattcaaaagccctttaaaacttcttcttttaaaaatcttgattggaatgccataagcagtgagttttatctcaacaccagcagaaaggtcagcagattccaagtaggcagagaaaaaattagagagatagcttagaagactctacatgttaactctatagttgcagatttttttttaacaatgaccatctaagctctgaattttccttgctgtaatttgcccatcaatgtaaaaatgtgcacaagaacaggccataatatgtgccaactatagtgggtcccagaaaatctggcatgccttattcatgtttgagaatgccattttgtttctttctttctttttttttttatactttaagttttagggtacatgtacacattgtgcaggttagttacatatgtatacatgtgccatgctggtgcgctgcacccactaactcatcatctagcattaggtatatctcccaatgctatccctcccccctccccccaccccaccacagtccccagagtgtgatattccccatcctgtgtccatgtgccatctcattgttcaattcccacctatgagtgagaatatgcggtgtttggttttttgttcttccgataggttactgagaatgatgatttccaatttcatccatgtccctacaaaggacatgaactcatcattttttatggctgcatagtattccatggtgtatatgtgccacattttcttaatccagtctatcattgttggacatttgggttggttccaagtctttgctattgtgaataatgccacaataaacatacgtgtgcatgtgtctttatagcagcatgatttatagtcatttgggtatatacccagtaatgggatggctgggtcaaatggtatttctagttctagatccctgaggaatcgccacactgacttccacgatggttgaactagtttacagtcccaccaacagtgtaaaagtgttcctatttctccacatcctctccagcacctgttgtttccggactttttaatgatcgccattctaactggtgtgagatggtatctcattgtggttttgatttgcatttctctgatggccaatgatgatgagcattttttcatgtgttttttggctgtacaaatgtcttcttttgagaagtgtctgttcatgtccttcgcccattttttgatggggttgtttgtttttttcttgtaaatttgtttgagttcattgtagattctggatattagccctttgtcagatgagtaggttgcgaaaattttctcccattttgtaggctgcctgttcactctgatggtagtttcttttgctgtgcagaagctctttagtttaattagatcccatttgtcaattttggcttttgttgccattgcttttggtgttttggacatgaagtccttgcccatgcctcggtgctctacacgttcagagaaacttctctagtaacaaactatagaaatgatccctgaaagtatagtcttgagaatgccattttgtttcttattcatctcctgggagcaaagaaaatcttctaagtcctgtaagggaattcagaagttttttaaaaattattatttttttattttattatttttttgatatgtagtcttgctctgttgcccaggctggagtgcaacagcgccatgttggctcactgcaacctccacctcctggattcaagtgattctccagcctcagcctcccgagtggttgggattacaggcttgcgccaccatgcccagctaatttttgtgtttttagtagagacggggtttcaccatgttgcccaggctagtccgaactcctgacctcaggtgatccacccacctcggcttcctagtgctggaatgataggcctgagccaccgcacccggacaaattcaggagtttagaccagtgttttagatggtggtgtctgccctggtagctgtaaagtagccctcgtgcatccatcatttagaatatttacttttgctcctgtaagattttcagaaacaagcaaggaaaaagagtcaaaccaaatagaaggaaaccaagataagaatgttccaaatattttaacccaggtgtgcagatcaaacaaaatattaaaccagagaaggtgcacagaccagagaagatgtacctcgcagacaggatgtaaatactttagaaacctagagtattcaatgcagaaagatacttgtctctatacccggaaggacttaccagaaaagacaaaaagtcttatttcaggagggatgtatggtctttcataaaaatgaccttatccaaacaagaccccaaataaagtcaaaaagcctccaacagaaggagggaggatcacttgtaatttgcccatcaccagggcagaaaaggtgagccagggaagtgactcagtaaatactgctcactggttccaagtatcaccatttccttctttttgttttggttgtttttgttgttgttgtttctttttattgagactgagtctcattctgtcacccaggctggagtgcagctacgtgatctcgcctcactgcaatgtccgcctcccgggttcaagcgattctccggcctccacctctcgagtagctgggattacaggtgctcgccaccacacccggctaatttttgtatttttagtatagacggggtttcaccatgttggccaggctggtctggacctcccaacctcaggtgatctgcccgcctcagcctcccagagtgctgggattacaggtgtgagacactatgcctggtcaccatttcttctgctagtgaactttttcaggtcctgtttcaaacaccatatatgtcaacctatttaacaaacagaaagagtctctctgaaagaaaagatatttgtttagcaatagagcattgcaatgggaatctgtataccatagtgaaatatgtgcaaattcagggagataaaggaagacaagggtttttaaatgaaaaaatgaggaggattacataattgttttgaaataattatccttggctacaaagatcaataacaagtctgagactggacagggaattgttgagcagatgtccttgcagaagtattatttgtataaggttatggtggactttgtgcaaagttgtggtttttgtagtcttttgtgacagtttttgtgatcaggcatacaagcatgaaaaccttctcttcatgttctccccatgcttgatttgtcagagttttcatttttcttcttttgggacaggatctcactctgccacccaggttggagtacagtggtgtgatcatggctcactgcggcctcaaactcctgggctcaagcaatcctcctgcctcagcttcccaagtagctgaaactgcaggcacctgccaccacacccagctattttttttatgttttgtagagatgggggggtctcactatgttgcccaggctgatcttgaactcctggtctcaagcaatcctcccacctcggcctcccaaagtgctggaattacaagtgtgagccactattcctggcccatgatatgtcagttttcttaacattagtgactccgtttcgattctgacaactttcacagttctcttactaatatatgttgttgacagccttctcaaagcaaaccttccatctgagctttacccatacatatgtgtatatgatacatgactagccacatgtatgatgcaggtgccttaaagacagagcaaactacatgtgctaaatagagtgtgctcttacctttacacccaaaccacagcctcttcagtttgtcagtgtcaataaacaccaccatgaccaatccagttgctcatgtgagagacttgtgagtcattacccatactaacctttctcaaacaaccctttatgagggcaaagtggctgatgcctgtaatcccaacactttgggaggctgaggcaggaggactgtttgaggccaagagttggagaccagcctgggcaacatagctagaccccatctctaaaaaaaaaaacagccctctccctctgtctccctctccccacggtctccctctcatgcggagccgaagctggactgtactgctgccatctcggctcactgcaacctccctgcctgattctcctgcctcagcctgcccagtgcctgccattgcaggcacgcgccgccacgcctgactggttttggtggagacggggtttcgctgtgttggccgggcaggtctccagcccctaaccgcgagtgatcccgccaacctcagcctcccgaggtgccgggattgcagacggagtctcgttcactcagtgctcaatggtgcccaggctggagtgcagtggcgtgatctcggctcactacaacctacacctcccagccgcctgccttggcctcccaaagtgccgagattgcagcctctgcccggccgccaccccgtctgggaagtgaggagcgtctctgcctggccgcccatcgtctgggatgtgaggagcccctctgcctggctgcccagtctggaaagtgaggagcgtctccgcccggccgccatcccatctaggaagtgaggagcgcctcttcccagccgccatcacatctaggaagtgaggagcgtctctgcctggccgcccatcgtctgagatgtggggagcgcctctgccccgccgccccatctgggatgtgaggagtgcctttgcccggccgagaccccgtctgggaggtgaggagcgtctctgcccggccgccccgtctgagaagtgaggagaccctctgcctggcaaccaccccgtctgagaagtgaggagcccctccgcccggcagccgccccgtctgagaagtgaggagcctctccgcccggcagccaccccatctgggaagtgaggagcatctccgcccggcagccaccccgtccgggagggaggtggggggggtcaaccccccgcccggccagccgccccatctgggagggaggtggggggtcagcccccccgaccggccagccgtgccatccgggagggaggtgggggggtcagccccccacctggccagccgtgccgtccgggagggaggtgggggggtcagccccccgcccggccagccgccccgtccgggaggtgaggggtgcctctgcccggccacccctactgggaagtgaggagcccctcagcccggccagccaccccgtccgggagggagatgggggggtcagcccccccacccggccagccgccccgtccgggagggaggtgggggggtaagccccccgcctggccagccgccccgtccgggagggaggtgggggggtcagccctccgcccggccagccgccccgtccgggaggtgaggggcgcctctgcccagccgcccctactgggaagtgaggagcccctctgcccggccagccgccccgtccgggagggaggtgggggtgtcagccccccgcccggccagccgccccgtccgggagggaggtggggggggtcagcccccccgcccggccagccgccccgtccgggaggtgaggggcgcctctgcccggccgcccctactgggaagtgaggagcccctctgcccggccagccgccccgtctgggagggaggtgggggtgtcggccccccgcccggccagccgccccctccgggagggaggtggggggggtcagcccccccgcccggccagccgccccgtccgggaggtgtgcccaacagctcattgagaacgggccaggatgacaatggcggctttgtggaatagaaaggcaggaaaggtggggaaaagattgagaaatcggatggttgccgtgtctgtgtagaaagaagtagacatgggagacttttcattttgttctgcactaagaaaaattcctctgccttgggatcctgttgatctgtgaccttacccccaaccctgtgctctctgaaacatgtgctgtgtccactcagggttaaatggattaagggcggtgcaagatgtgctttgttaaacagatgcttgaaggcagcgtgctcgttaagagtcatcaccaatccctaatctcaagtaatcagggacacaaacactgcggaaggccgcagggtcctctgcctaggaaaaccagagacctttgttcacttgtttatctgctgaccttccctccactattgtcccatgaccctgccaaatccccctctgtgagaaacacccaagaattatcaataaaaaaataaatttaaaaaaaaaaaaaaaaaacaaaaaaaaaacataaaaattagccaggtgtggtggtacaccactgtaatcccagctacgcaggaggccaagtgggaggatcacttgagcccaggagttcaaggccacagtgagccatgatcacacaactacattccagcctgtgtgacagcatgagaccctatctctaaaaattttttttaaagtacaaaagaaaaaaagacctttacgaaacacttgctatgtttactgcatacttctttcccaaggaattattgtgcaagtacaacgctctccttcatgctgattttcatcatctgtatcagagccatcatcccgtctcacctagtttacttcaaacatcttcaaaagatcaaaacatcaacagttgttttgaagatgtttgaagtaaactaggcgagaggggatgatggctctgacacagatgttttttcccatgtttacgcttactcaattcaataaactatgctcataattgttaggtaaactagacaattttttaaatgtctcctgtctctttgataaagtccttaaattacccaaaattactgttgggtacaaattcctaacctaatcgataaaacatggcagatggtcacggcatcctaactcagtaacctcagctcctgctcaattctcttgttgttggaacacaaggcatagcacacagaatttcctttcattctttgcatgtcctttgttcctttctgcaaatgttgttcaaacaatggtttccatttgcctaaagtgcctgctatggctggttaacctctaaaatatttagggagcagcccaacctgcagatacaaagatgtcaaaaaacgaaattacaacacatttactttaaagaccttaatttattttatttgtgattctagaatcaagcagcactttattctacaaaatagaatgagtagaggagctgagcagagcagggtggttttacagacagaaaagggctgaggaaaacagacacagagagcagaaagtgccttggccatttcaaagttacttcccctgtaaaggttaaagcagagggggtttcaatatcatgccagctaaaactggtcaggccgggtgcagtggctcatgcctgtaatcccagcactttgggaggctgaggtgggcagatcacctgaggacaagagtttgagaccagcctggccaatatggtgaaatcccgtctctaccaaaaatacaaaaattagtcgtgggtggtggcgcatgtctgtaatcccagctattcgggaggctgaagcatgagaatcgcttgaacctgggatagagaggttgcagtgagccaagatcacaccattgccctccagcctgggcaacagagtgagactctgacttaaaaataaaataaaatgaaatgaaatgaaataatgaaatgaaatgaaatgaaatgaaatgaaatgaaatgaaataaactggcctgcttggagatttggctatcatctccctctctctctctctctctctctctctctctctctctctctctctctcgaattattggaagatcagataaataacctagtttcagcttggtggcatggaacttcagcaggagtaactccatttttgtttggtctgttgagcctcatgcaggggctcagcccaaaccaatggctaaaccattggctaaactgtaaagtttatttaacaaaggggagctttccatggtcctgaaacaaactaccctgagctcctcattgcagcaacctatgcaactacaactatcattggttctgtaattgtttctttgatgtctggattcccccacagactttaaggaagtagatacctttctgtttactactgaataggagtgacacagggaaggtacttcttcacagtatgagatgagtggatgaatgactagagtataaaacgctgtcagcaactgggtaggctctacaacttcctcagcaggaggaccagaggctggaaacatgggtgtcactttttaagagcaaaagggggctgatggttggaaaaccagatactagaagaatgctggttttcataagccacacctgtggattgtcaaaaagaaaaagcacacatttcaaaagcagaagagaaagaaaaaaataaggcaaaagtgctcacaagtatcagaatagattttgtggctctggtctctggggatatttgcgagcactgtttagtgccatgaatgtatcagacttgccacttgtaccggtgagggaaaaaatatcttggagccactggccccatgccatgattcccaagcaaaaaacatcaatacaggagaaaataactgaacacattgattttgtaattgtatcaactaatagatgagaacaatatccaaggtttgatttcacagtgatatttctgctactccattggctagtcattctcatgggaacaatgagatttaccagcaagtgaaacacccagctcacaatacagggagaattaatatgtttggggggtttgaatttgagttctgcccacctggagtttgtggggttgatacttaaggcctggaagccacctaaaagacagatggtgttgagagaatttccccaggccactctgtgacaataaaagacaagtttacatccaacatcatccaggaagtattgcaacccaaaagctgccatcttctgagggattcctccacaaagaaggattgatgtattggctaacacaagatggttggttatttgctctaacggtctcaatctgtgtctcctaaaaagagaacagatataataacaaaggagtaacgaaaattccccacaatccctattccagtctgtgtaaagataatcacacccattgctacatcaatagatagcattccctcagtgactgagagatgatgcttttgctcagatccaggaacctggagaaaaatggaaggaacacatgaatttcttcaagtgaaatgaaatgtacttaatttctttcaaatctccttcctgggacccctatgctattgtcacacataaaaatcccatccatgaaggttttttctcctcaccacctagtatatctttcttggtacctataacaacagaaattatcttactggattatcttatttctattgaaggaagaccatttcctccaatggaaagatgaaggtcatgaaggcagacatcttgtctaccctgttttcagcccataactaaggtttagaacaacatactgttaagcagtcagtcaatatttatcacatgaataaatgaatgaactactgaacagagtcattatttccgtgtcaaaaattatttcaatgtgttctttaccttaatagatttattaacatgggaagcagaatctctccttgatagttaaaaatatctagtgcattaagctaattgcgttattcgaaactacatatccttgcttgatttgggggttttgctttgttttgtttgtgtaaaaatttggtcttcttgagagacaagtgttcagtgtcctatgttgcacttgattctatcaaatactctttgtcaagcatgatctttctataatccaaaacaaattttggaccaaggacccaaactgaattaggcagagtaccttaataataaaacattaacaaagatatagtccaggaatacacatgattaatatcaaaatgaacattagatataatctcatcttggccgggtgcaatggctcacgcctataattccagcactttgggaggcttaggcaagaagatcgcttgagtccaggagttcgagaccagcctgggcaacacagcaaaaccctgtctctacaaaaataaaacaattgaaaaacaaaacgaacaaacaaaaaagaattaatctcatttcattggggaaaaagactaacgtgaccacaggcaccacaattattcaatatttttctcacctggtcaataaaatggaaggtaaagtttatccctctttgggaaagttagatgatttttatgttacattcaaagaaacaactaaaatatttagaagtaataagatagtaatttgcccaaatataacataaataaaagaatacactgtgtataaacactttgaaaatcttaggagtaatctagatcagtaatatgccagaaatatgagcattctcaatcaaaaagtggaaaataaatcttgaattagtagaatgaaattccatgttcttggatggaaagacataatgtgctctcaagatttgaaatttcctcaaataaatttgtagattcaattcattatgaatcaaaattgcaagggactattttaggagctatacaatttgcaacaaattttaactacattgctcaagaaaatccaagtcattttcccacttttttaaatgaaaagttttcaacatacagaaacttagccatttatttaaaaaagaactggattaatttcctacctaatttcctaaaacctaatacagcaattaaagtgtgtagcacaaaaaaagaatagtcacacatatcaatggttcagaacattgtccagaaaagttatttataagttggaaattcagcaaattagaatataattgatcaatattaaggatctagaaaaacagatgaatgatttgggaaatatacaattggatggccaaatcaaatcatacagacaaatttcagggcaaaaagaaaaaaattaggaagagatggaactctcttttctcacacacagaaagaaatagcagaggcgcatttggccacaaacctgatggctaatcctatgtggactcttggcttgagcaaaaagaggggagatgcctccccaagatccatgtaccctgaggttcagtgagatttcattaactcactaaacctttgccagcattgacctctgtggtaaccactgccctgaactgcatatattctttcaaggtttttatcgctcccctggaacacagagcagaaggtagggtctacatcaggtatgtgattatagggtcagtatcacatctcagaatccaattctcagatccacgtagctattacaagggagggtccagctgagaaaattcactagtaaacacgccttcttctgtagttgagtctggtgtttattccaaagagtattatgtggatttgaaggtcagaatccttaataacatgtaattttctgctgcaccaattctaataaaattctggacaatgccttgaaattttcacgcagtgcatacacaaaaatgttcagtataatgaattgcccaagtgcagtctcaccttgacaaggtccagtggaaacaaaagacactaacatttatttaagatagcttgtgcaccaggcctacaattttctctattttaatttgaattaatcttgtccccatgcttaaagaatctcaggttaagaacaaacattctgcagaaggatgggctaaaaatcaaagaacaaatcaaggaacagaggtggaaattcagacagaacttatacagggaaagagttaaggagacattgcaggaaaatgggtaagaaaagtaaataatctgcaaagaccagagaatatctcttcacagtgaaaatgggctctattatgactctggtatagtctcatgaaaaagcattaatggtccagacattgtatagattcccatgtctaaatattcaccccttttctttcccagacgatttttaagtctgaaataaaaactccactcacctaagtaacctccattccaggatgttgtacctaatgtttaccagatttgtcctgagagagaaagctaagcctttagttttcattgccttgacctcatctctctctagagctgtgattattatgttatttctagcatcagtgatagtgtctccaagaaaaatctgtacacattttttcttagcataattaacttatccaaattaattatgagtgtttacagagaacatcccaagatgctgccagaggtagctggagaaaaagttttctgaactccctataggggtgaggtcaaataattatgaggcctaaaaagtgagggattggagaataaacacatgattctggctatatttaaaaaaaactctaaggggtatatttcttagaagagaatttttgggttcctaaaaacctgatgaattctacctattaaagatttagtagaaaaaaaaagagaggagaggcattccaaagatagagcatgtgggacatataaacaaggtagcaagtgttgacctagaacccattataagaggtaaaataaatgagatgaggtggtgtggtgggaaccaacctactatggaccaagagtgtgtgggggtgaggaaatggagggagggagtgtggaccactctctcagtaaatatcattataaaggggtacccagggattgatgaggttaagggagaatttaaatactcatagaaggctgggtgaggttggcttatgtctataatcccagcactttgggaggctaaggcaggaggattgcttgaacccaggagttcaagactagcctggtctataaaatttttaaaaattgaaaacttagccaagtacagtggtacatgcctgtgttcctagctacttggaggctgaggtggatcacttgagcccaggagttcaaggctgcagtgagctatgatcacactactacactccaacatgagcaacagagagagatcctgtctctaaaataaataaataaataaatacttacgggtaagatctggcagatcagaatgtgttgaatttaagtaaacatatttacatttgttagattgaggcctatcattagtttaaaaagagtataatccatggcataagtaaaggaattaatcttaattttaaagaggaatatatcactcattaacataaatttaggaaaaaagaatgagtgtaaagtcaggattaatctgaattgtgtaaggaaatagagggatttctcaactaggagaggctgaagatggcttcaacttctcttaagaagcaggagacaagcatatttgaaaagagatagagaagcatagagacctgagagtaattgagaatatttgaaagcacagcagtggataatggcaggaagagttggaagatgaaacagaagagggctgttgggcagaatcatagcagggattcggattattgccaatgaaacatttatgactgatgccaatctacctagttgcttattcagctacacaagacttctatagtgtaactatgggagaagggaaatggagaccagattcaattaatatgttttccagttcagagtcatggaatgacaataagaaaggaattatggataccgaaagaaatagaaaggattgacaaaaatattacactaaagagagaaagaaagattgagatgaactggcatgacataaattgagactatatattaatggcccagaagccaatgaaagagaatagaaagatgtgtaggaaaaaaagctgcaaacatctacatggagaccccctagagtcttcataggacactaaattgtgcattcatagggtgaaattccataggattgggcatttaaaaaccagaaaatggtgaactaaacaattcccagagctcaaagacggacaatgttcaagatatgactggcttagccaggcgcagtggctcatgcctgtaatcacaacactttgggaggccaaggtgggcaaatcatgaggtcaagagttcaagaccagccctggccaacatggtgaaaccccatctctactaaaaatacaaaaattagccaggtgtggtgggcgtctatagttccagctatctgggaggctgaggtgggagaattgcttgaacccaggaagcagaggttgcagtgagctgagatggtgccactgcactccagcctgggtgaaagaatgagactccatctcaaaaaaaaaaaaaaaacaattaagtcactggatgggattaacaataggttacacaatggagaagaaaagatcagtgaattagaagaaatagcaacagaaactatccaaaatggagcaaaaggtgactatcatcataaagacaaaagatgacaagcattgctgagggtgtagagaagaaggacccttgtacattgttagtgggaatgtaaattagccattatggaaaacagtactgaagttcttcaaaaaattaaaaatagagctaccttagatctagcaatcccacttcggagtatatatccaaagaaaaagaaatcagtatctcaaagagatatctgcactttcacattcattgcaacattatttacaatagccaagatatggaaacaatctaagtgtccctcaacagataaatggataaagaaattatgagacatatatattatatacatatatataataaaatatagttcatcttttagaaaaataaggaaatcctgccatttgtgacaacatggatgatcctagaggacattctactaagggaaataagccagatgccaaaagacaaacactgaatgatctcactcttatgtggaatctaaaaaagtcaaattcatagatgcagaaagtagaatgatggttacaaggaacaggagtaggcagagggatctaggtcaaagtgtacaaagtttcagttatgtaggatggataagttctagaaatttaatgtacagcatggggactattgttaataatactgtattgtatacttgaaatttgctgagagtacatcttaagtgtactcatcaccaaaaaaatgctaactatgtagacagatggacatactaattagctcactgcagtaatcagtttaccatgtgtatgtatatcaaaaaatcatgctgtacatattaaatatacacaatttcaattttttaaatagagcaaaagagataaataaaatattgaatttttttgaaaggaacagagcttcctttacctgttaaatactatcaaatgggctgttatacatgtaattagaatcccagaaggaaaaaaggaaatatacatacatgtgtattttctgtttttgtttttgtttttgtttttgagacagaatcttgccctgtcacccaggctggagtgcaatggtgcgatctcggctcactgcagtcttcacctcccaggttcaagtgattctcctgactcagcctcccgagtagctgggattacaggcacccaccaccacacctggctaatttttgtatttttagtagagatggggttttgccatgttggccaggctggtctcgaactcctgacctcaggtgatctgcccacctcagcctcctaaagtgctaggattacaggcgtgaaaactcagatgttattgtgggaaaggtctgctgccagatttcagagaaaccaccaagaattttggtaatcacatgatgtagtgataatgggatatagtgacaaaattggagatttgagagtcctcaaatactaatacccagattcttatgctacatgcaggcacagctaaagaattaagctgaaaagctctttaaaatagtatgaaaattcccaatttttacataacaaagaagcaaagtaccataaggcttttatatgaatgccatcaacagccatgccctaagaatgtgagcaaatgtgagcaaatggagatagactaaatcttgcaaactttgcaaataagctctgaccacactcagtaccagctcagattaaggtgatcaactgcacaactgtctaatacagaaaaaaggtcacctaaaacaataaggcttaatacaattaaaaattatgagacattctaagatgcaagaaatgtgactaacaatcagcaaaaacaatatcaaatttaagcaaacagatggcccacatattggagatagtagacaagggctaaatatatttcctcaaagaatgtggggctgtgcattttgcttggctccaagggactggcacagactcttgccttggttttggctctctctactgcagtagcttctccagcagcagcagcagaagctctaaagggacagaacactttcctccctactctttggactcagacatttaaggaaatctttgataggtctaactacagagatagccaaacagaattttcaatgatcacacacaaaaggaataaacactctgcaaaaaaaaatttgagaaagtcacaaatggatgctctaatcctcaatgagcaaaaatcagcagtctctgaggagttagagaatcattttttcagaattaccacattataatattgacagtatccagctctcaaaaaaattactaagcatacaaataaataggaaaatatggcccattcacaggaaaaaaaaatctgatagagaccacactcgaggaatccctgacgttgcaattactagtgaaaaacattaagtcaacttttaaacatgctcaatgagtaaaggaaaccatgaataaagaactaaagaaaacctgaaaattacgtgtgaataaagtgagaatacccctgaatacctataaagatatagaaaggaaccaaacagaaattctggagctgaaaagtacaataagtggaaaattcactagaggtattcgacagcagacttgagcaagaagaagaaaggatccgtgaacttaaatttaaggccatcaaaattattcagtctaaggagcagaacgaaaaaaagaatgaagaaaatgaacagagtcccagggatctgtaggacaccatcaagtgtaccaacatatgcatcataggaattctggaaggagaagaaaggagcaggaaaaaattaaagaaatagtggctgaaacttcccaaatctgatgaaagacaagaagctacacctaagctcaacaaattttatcttaactacatgtaaactcaacacacttcaagcaatataaagtcaaagaaatttacaggtagatttacaagtgaatcatcacatatgatagatgctcaataagatgaacagttgatttctaaacagaaaccacagaggccagagggcaatggtatgacacatttaaagttctaaaagaaaaaaactcaaccaagaattctgtatctagcaaaactgtccttcaaaaataaaggagaaattaataaaggagaagcataaaaactgaaggaattcattaccagttgacctgccctacaagaaatgtcaaagggactcttcaggctgagataaaaggatattagacaggaacttgaagccattagaagaaataaagaacactggtaaagttaactacacaggtaaatacaaaatacaatttattgtaattcttctcttttcctttgtgatgtaaaagacaaatacatagaacaataattatgttattgttctattgtctatgttaatgagaattcagtgtgtaaagatataacttatgagaataacaatataaaggagaaagaagagaaatgaataagagcagtgtttgtactctattgaaactaagttgttattattcaaactcttaaacagccaagggtcaaaaaagacagcacaagagaaattagaaaatgccttgagacaaattaaaattaaaatgcaacatactaaaacttatgggatgcagggaaagcattactagagggaaatttatagctatgaatgactacattaaaaggagaaaagttctcaaattaataacctaactttacaccttaagactctggaaaaagaaaagcgggctaaacctaaagttagcataggaaaggaaataataatgattagaccagagatacacaaaatacagaataaatgcaatagagaaaaatcaacaaacctaaaattggttctttgaaaaaaaatcaacagaattgacaaacctgtagttagattaagaaaataaagaaagaaaactcaaattactaaaatgagaagggagagtgagagcattactaccaattttacagagataaaggggattattagagaatattatgaacagttgtacaccaacaaattggataacctagataaaatggataaattcctagaaacacacagtctaccaaaactgatgcaagaagaaacagaaaatctaaatagacctataactagtaaggagattgaatcaatactttttttaaaaacactttattaaacccctccaaagaaaatctcaggaccagaagccttcattggggaattctacctaacagttaaagaagaattaacaccaactcttctcaaattctttcgaaaattgaagaagagggaggactacctcattcattctaagaggccagcattacgctgatacaacagccagacaaagatactaaaagaaaagaaaactacaagccaacatccctaaggaagatagacgtcaatatcctcaacaaaatactagcaaaccaaattcagcagcatattaaaataactattcactatgatcaagtgggatttaccaccagaatgcaagagttgttaaacatagaaatatcaattaatgtaatacaccacattaatattatgaaggaaaaaaacccaagatcatatcagttgatgcagaaaaatcatttgacaaaatccaacagtgtttcatgataagaatactcaacaaattaagaacacaggggaacttcccccaacatgataaagatcatatatgaagaactgtccagatgcagtggctcatgcctgtaattccagcactttgggaggcagaggcaggagggtcatttgagccctgggtggcatggtgagactccatctctacaaaaatatattaaaagaaaatagccaggcatggtggcatgcacttgtggtctcagctactcaggaggctgaggtgagaggccgaggtgggaggattgcttgagtgcagaagttgaggctgcagtgagacatgtttgtgccattgcattccaggctgggcctcaaagtgagaccctgtgtgaaaagaaaacccacagctaaaatcacactcaataatgacagaccgaatgtttttccctggatgattaaaattttctaaatctggatagtgatgacggttccataaccttatgaatatactaaaaaccactaaattgtacacttttataaaagtatgcattttatgttacttatatctcaataaagctgttatttaaaatgaacatgatatggtctccaccaccaagaagcacagaaacaattttggaacgttacagaattgaaaaagatgatttctcagcaacaaagtccttatgtgcacaataaagtgattaatatttcccaggtgctttgataagaaatatatattgagagctagctatgagagaagtcttctcttgtttcttttgtttttttttcttttttgattgttactttaacttttttctagagaatctgtttaaatgggaaaatgccaaggtaaatattctctattgacatgattcaacattttttgtataaatactgataaatgcttatcgaattaattcatatttaaaagaatggacatttacttgggtcatattggtgtttctattggtgagaattttgacaaaaccgagatgcaccttctttttttttgttttttgaggattgtagttttttttttattattatactttaagttttagggtacatgtgcacaatgtgcaggttagttacatatgtatacatgtgacatgctggtgcactgcacccactaactcgtcatctagcattaggtatatctcccagtgctatccctccccccgaccccaccccacaacagtccccagagtgtgatgttccccttcctgtgtccatgtgttctcattgttcaattcccacctatgagtgagaatatgcggtgtttggttttttgttcttgcgatagtttactggggatgcaccttcaaaggggaaatgaagaataatttatttatttttttctaatttttatttatttaaaaaaaattttttgagacggggtctcactctgtcacccaggctgaagtgcagtggcgcaatcttggctcactgcaatctccgcctcccaggttcaagcgattctctcaccccagcctcccgagtatctgggactacaggcacctgccaccacatccagctaatcttggtatttttagtagagatgaggtttcgccatgttggccaggctggtctcgaactcctgacctcaagtgatctgactgcctcagtctcccaaagtgctaggattacaggcatgagccaccatgcccagcaagaataatttaataaagagagtatttacagaaatgtatggacagggttaagggaaaccaacaagggatagcaaactatttgaagctagcagcaccgatagccattgcccctcctcctagaccagaaggagttgaggagaaaatggttaccaaagcccaggatacagcaagacccaagacagcctggcagagaggggctggaggaatgaatgctctgacatcattgcaactaccctttcatcctctgctgaagcctcccattcactgacctcatccaaagccaagaggtgagtccactgatgtaatctacacaggccagcctcctgggcacatagtagagtggagaaaggtaaagggtggacctaggagggaaaatgaaaaacaggtggcagagatcaatctatttgctcctcacttgctctttagaatgggggattccagccaacccaggtttttaaccaaagagctaaagacacagagggaaaggatggagaacgctctttgttggcacaactgcagtaattgcacttgatctttgtccagatgaaaaaaaaatctactgtcaattcagccatatttccatcagaggtcttcataaaaggccgcagaaatgtgttaaagaaataattagtagcgggatgtggtggcacgcacctgtaatccccacctacataaaaggcaggaggatcacttgagcccaagttcaagaacagcctgagcaaaatagcaagacctggtctcaaaataaagaaataaataaaaaatttatttttaaaaataagcaattagcaaatataaaaaagtggctgctatagtcaccacttctataactagtcctgacgccagggtgctgaatacataattaattgattgattagaaatgcaagagactattctgtcattaattataattgcatgcatgcagttgccctggatatttcctgtgaaagactttatcatcttaattatagatcttccaaaagagacagccttaaataaaatgtatagatatgtctctcttttgcgcagggggtggaggggtacttagcacatggacacctttttgtgtttagagaattcactattttattttattttatttttgagacagagtctcactgtcacccaggctagagtgcaggggcgtgatctcagctcactgaaacctccacctcccacctttaagcgattctgctgcctcagcctcctgagtagctgggactataggcgcacaccaccacacctggctaattttgtatttttagtggagacgaggtttcgccatgttggccaggctggtctggaactcccgacctcaggtgatccactcgcctcgacctcccaaagtgctgggattataggcttgagccactgcacctggctcatcagaccatttcattgtcatgttttgaacattgttctggggggcttagactctcaatggtttgttaaggagctcttttaaaaaaaataaactctttgtatttttaatcagcctgattcagcttctgttgtgtgtctgttacaaagaagtaagtgaatttacaacatcttgtccaattaaatgggatttaaagcaggaacttagaagctacctaaaaaggagttattaccttagaattaacaggctgttggatgtcagggcccatgttaggaaagattatgaagattaagaaaagaagacccagagctctgctcagattaactaaattcccaagctgtaaagtaattaccccaagacccatggtcaaaagaaatggattatgatccctgatataggaaaaaaaaaaaacaaacctacaaaacccagaataaggaagagataagcgaccaaaaatataccatccagatcattaaatcatttggaattaagaaaatgtttactgcagtactggttctcactcctacaaaaaaagaaaggaaggatagaaaaaaccatattggtttttggtttttttgtttgttttgttttatcagagaactttgaagtatttagcattttaacctggtctttaatggtccaatatttctctaccatgactggcaagatttgtgtggctgggaatttaatcagaaaagtaaagagaagtgatttccccacaaactctcagatacacgtggcagatgtggttggttctggatcttgaatatagcaccattataatgtagagaaggcaaagcaccataggactgtaacttgcaaaaattttcatgcaaagattgctcccccagggccaaaagttggaactttaaaattatttatggacccaatcccctttctgaaggtgagttgatgtacccctgtgcagtagtatttgtctattacatttttcatcagagagtactttagacaccaagctttcttttctgagtggctgcgtaaatttatagtcttagcactctataacaaggggtaagcatagcaatgaaatatcactgaggaatttattgatcctttattgagatatggcgacatgattgcaggacagaaaagaatggattcttgtcaaagccaggatttgaattcagccagttcacatttttaaccatactatactgtatcttggagggtctgaaggatgcacaagacaaggtgaattttttgccaagaagtccacactcaacctctggggtaggctgaataacggtccccaaagatgttcacatcctaacccccagaacctgggaatatactgcagtttcccttacatggcaatagggatgttgcacatatgaagctaaggatttttttttttttttttgagacaaagtcttgctttgtcacccaggctgaagtgcagtggtaccatcctggttcactgcagcctcgacctcccaggctcagcaatttacccaccttggcctcccaaagtgctgggactacaggcatgagccactggactggccgaaattaaggatcttgagatggagagattatcccgaattatctagtgtgcccaatctaatcaccgggtccttataagagagagaagatgtaaggacaaggcagaggtcaaagaggagagaagaagccacgctgccggctgtgaaggttttactcgtagtgactgtgaagccactgccagtaataagcagagaagaaacaggatctgatttgcatttcgacaggagaatgacttcgcagggaagggatagaagcagagagtccagttagaaaactattgcaatatcccagggaagaggtgatctgtgtcctggcccaggtgttagcatgtggaatacttcacagataaagccaatgggatttgccgacatatcagacatgacatacggaagaaagagaggagtctgtcaaagatgactccaaagatttcagcctaagcaaagggaaagatgcaggtgctgttaactgagacggggaagcctgcgggataagcaggtttgggacggaagatcaggatctcagctttggatacaagtaatttgagagcccattaaacattcaagtgcagaattcagaggagaggtttgcagtgccaatataagtttgagactaacggtggatacagagataccctgtccagatccctcttccaagcaggatttgctgcttcagccactgggagtgctgtcagcagacaactttctgctgtcaagtccttcaggaccagcctcaattgcagagagctgccttgaccaaatgcacacctctccggggaaagccccagtaaggaatataaggcccagcaatctgagccaaacagataacaagtctaataagctattctcttcataaatttgtacggctaaaacagaatacctgagactgggtaatttacaaagaacagacatttattttctcatggttctggaggctgagaagtccaagatcaaggcgctagcagactcagtgtctaatgagggtcttatctgtgcttccaagatggtgccttgaacactgtgtcctccagaggggagtaacactggtagaaggcggagggcaaaaaaggataaactcccttcatcaagcccttttataataccattaatccattcacgaaggtggagccttcatgacctaaacacaccccaaaagtctcacctcccaacactgttggattggagattaaggttccaacacacgaattgtgggggacacattgagaccacagcagctatctatgctgcagagctcttgcagggttgaccatggccaaggttgtgccacgtctaattcaaattctccatctgctcaaccctggctcccctctcccttccacaggcgtcaacccctaataagtctcttgcaccccaaactgcatcttagtgtctgcttccagagaactcaaacaacaacagccctcaacagcatatagacggttatgcaaagcctagaagttgcatttaccttattaacaggttcttaaagtatttcatgccaacttcccaaaaaaatagactcttctctgtccagtgagcctaacatcctgacctggagaggcaagagcaggattttttaaaagcacttcatagaggccacagtaggaaaggccaaagatgcccaaactcatcagtattcagaatattctaattaacacacaatgaggccaggtacggtggctcacaccagtaatcccaacacttagggaggccgaggtgggaggatcgcttgagcccaggagttcaagacccacctgggcaacatagcaagactctgttctccacaaagagaaggggaaaacccacaacggcataccatttcatacccagcagactgtcgaaatgtaagtctctcaatatcaggttttaatccatagaataaaataaatatccacacttctcggccgggtgcagtgactcacacctgtaatcccagcactttgggaggccaaagcgggtggatcacttgagatcaggagtttgagacctgcctggccaacatggtgaaaccctgtctgtactaaaaaaaaaaaaaaaaaaaaaaaattagccaggtgtggtggcacacacctgtaatcccagctactcaggaggctgaggcatgagaatcacttgaacccaggaggcagaggttgcagtgagcagagatcacaacactacactccagcctgggtgacagagtaagactccacctgaaaaataataaataaataaataaatcacacttctgcatggatcgaaataaaaaaataaatacatgaggagaagggatggttctatctttcagtagatttacaatttataaatgtaaaaggagaaaggaatatgaaaaattaccattagtcaaatgtcacagcaataactgttgcagacaagatccaccaatggatgctaaaatttgtgggcaaaagtttgagaaggaaaaagacttgtatagtctcaaaaaatctccttcaagatagtttttaattaccaaggggaaaatagtaactttacagtggagatgtgcagcatacagcaatttaagtgatcaaggtcagcatcaccagcaataagatacactgacatcaggtgcctcctgatatcatgcactgagaaggacacaacatcatttctgtggcgttcttggcaaaaactcataactttagtccagtcatgagaaaatgtcagacaagcccaaattgaggaatatcctataaactaactgatcagtaccattcaaaagtgtcaaagtcagttgggcatggtggctcacacctataatcccaaagctttgagaggttgaggcaggaggattgcttgaggccaataattcaagatcagcatgtgcaacacagtgagaccccatcctgacaaaaaaaattagccgggcaccatggcatgtggctgtagtcctagctactcaagaggctgaggcaggaggatcctctgagtccaggagttgaaggttgcagtgagctatgatcgcaccactgcactccagcctgggcgacagaaagagaccctacctcttaaaaaagcaaagtgtcaaagtcatgaaacacaagcaaatacagaggaaatgttcctgtctagaagagacacaacaactgaacacaatatgggagtctggaacagaaaaaaggaaaaaaaaaggacatcaatagaaaaagtgttaacattcaaataagattggtagtttagttgatactgtgataccaatgttaatttcctagttttgatcattgtgctatgctaataacaatagggggagcaggatgagagatatgtgggacctctctgtactatctgcacttttctgcaagtctaaaattatctagcattacagcttccacctcactctctgcgttaacttgctcaccatctggccctccccacagtccccatcatgtggcctagcttcccctagagcaagtggacccagaggagtgtgagtgagcccccttggaagggcattctccagttcctttaaacccttctgatgactgaaccccaggccagtgccttcgaaccagaaccatgtggataagctgctctcaaatacttgacccacaaaaagtgtgtgagacaataaatgtttactgcttttacctcccagattttctttttgaaattcagaaagttgttgttgcacataatgacgactagatggcaccagaattccaaggatagaagcaggctgccagcatcatgaactcaattgcctctgagtttgtttacaaatttattgcaatcccaatacagatatcatcaagggttttgtgtgtgtgtttgtgtgtgtgtgtgtgtgtgtgttttctttttttgccccagagctagaaagaagcagtagcagccgtggctgccaccaacttaggcagtagctctaccaaatacttaaaacgatataagtggccaggcgtggtagctcatgcctataatcccagcactttgggaggctgaggcgggtggatcacctgaggtcaggagtttgagaccatcctggacaacatgatgaaaccccatctctactaaaaatacaaaaattaactgggcatggtggtgggcacctgtaatccctgctactcgagaggctgaggcaggagaatcccttgaacccgggaggcagaggttgcagtgagctgagtttgcaccattgcactccagcctgggtgacaagaacaaaactccgtatcagaaaaattaaaaataataaaaataatacaataaaaataaaacaatatgtgcccttgccatggttggggctaaaaaaaaaaaagtaaataaaaacaatattttaaaatgtgttactgatgcataaataagcagacagatcaaaagaaggttagaaaatccaaagacagaagcaattgctgatggagatttatatgatgatatagtaatttctaattcaggaagggactttagaaaaggttttaatttagtagtgtagaaacaactagatgaccacgtgaaaacaaagaagcttgaatgcatttcccaccccatataccagattaaatcctaaacatatcaaagatctaaatgaaaaaacacagcctcacagataataaaacactggtgagttccctcattaccggggagggtgtaaattttccaaactattactcaagatccagaagccataaaagagaattttgttaaatgaccaaacaaaaaaaaaacaaaaaccttttgcgtggccacaaaataagccatacacaaccaaaaactacagatgacaaaataagaaaaatatttaccacttatatcacagaagagaaagagttaaaatccctaaaatataaagtgtctaaaaattaagggaaaaaaaacaagaaacctattgaaagcgggcaagatacataaacagagagttcacgttaaaaaatgcaaatgccacctaaatttataaaaatagccagacacagtggctcatccctgtaatcccagtactttcgaagggaaggtgaggggattgattgatcccaggagtttaagaccagcctgagcaagatgacaagaccttgtctctaaataaaataaaataaattagctgagtgtggtggcacacacctgtgatcccagctactcgggatgctgaggtgggaggatgggaggactgctggagcccaggagttcaaggctgcagtgagctatgattgcaccactgcactccagcctgtgtgaccgagtaagaccctgtctcaaaaaataaaaaataaaatatcacacctgtaatcccagaattttgagaggctgaggcaagcagatcacctgaggtcaggagttcaagaccagcctggccaacatggcatggtgcatgccatgttgcagccaggcaacatggtgcagccaggcatggtggcatgcacctgtaatcccagctactcaggaggctgaggcaggagaatcgcttgagcctgggagacgaaggtggcaatgagccagccgagattgtgccactccactccagcctgactggcaaagcaagagcctgtctcaaaaaataaaaaataaactaaagctcagcctcactcataataaaagaaacacaattaaaactgccctgagatcctatttctcacctaacagattagcaaaaatccaaatgttggacagccctcttgttggcaacgctgtggggaaacagggactcttccattttactgatggaatataaaaagataaaacctccatggaggagaatttggcaatatctagtgaatttgccctttgactcagcaatcctacttctaggaattaggtccaaagacacagacagaaataggaaacttcatatgaacgtgcctcttcactggagccctacgcatgatagcaaaaaactggaaactattgcaatagccatgaagagggtgctgcttaattcaactatgctatatccacaaatacagagcactgtacagctgtgaaaataagatatattaagattacatatatatgtgatgtgtgtgtatgtacaagtgtgtacacacgtgtttttttgttttgtttttttgactatttgtttgttttgttttgttttgagacagtcttgctctgccgcccaggctggagtgcaatggcacgatctcagctcactgtaacttgcacctcccaggatacaagccattctcctgcctcaacctccctagtagctgggactacaggcacgtaccatgacgccctgctaatttttgtatttttagtaaagatggggttttgtcatttttaccaggctggtcttgaactcctgacctcaagtgatccgcccacctcagcctcccaaaggtcctgggattacaggcgtgagccaccacacccggcccatgtgtacacacatatatagtcacctccaagatgtagttaagtgaaaaaaccaaggtgcaaattggtatgaacaggatgtaccttttgctcaatagagaggaaaatgaatacatatgttcattggtttatattttccaagtaaatggaatgtcaaaacaatttttgcgattgggactcaatcacccacaaaacaatggttttggttttttgttttcttgagacagggtcttgttctgtcacccaggatggagtgcagtggtatgatcacagctcactgcagcctccacttcctgggctcaagcgatcctcccacctcaacctccagagtagctgggactgcagacgtgtgtgaccacgcccagctaattttttactttttatagagatggggtctcattatgttgcccaggctaaaacaatgtcttaaagtaatttaagatatattaatttgacataaatccctaatggggtatatcctcctggaaaaaaaagcaccataagaaaatcttaaactatatttagtcatcatattactagtgatagtattgatattttaaaattttatatatgcacatatatattcagatatgcatatatattcacatacttcaaaacgtatgctgatgtcactacaattcaaaattctctttttttctttgagaattcaacattctctgaataagaaaaaagaggcataataataacattttagaagttgtaaagggcaaaactaaactatggacacacatttggataactaattactataaagaaacacagagatgattgctataaaagtcaggctggccaggcacggtggctcacgcctgtaatcccagcactttgggaggtccaggcgggcggatcacctgaggtcaggaattcaagatcagcctggtcaacatggcgaaaccccatctctactaaaaatacaaaaaaattacctgagtgtggtggtgcacatctgtaatctcgctactggtgaggctgaggcatgagaatcacttgaacctgggaagtggaggtagcagtgagccgagctcatgccacctcactccagcctggatgacagagtgagactctatcttaaaaaaaaaaaaaaaaaaaagtcaggctgagggttaattttggtagagagaagggaggggctgggcctgggcgcctgggctagggcacgtggagaggcttatgaacagctggcaaattctatttcttgacttacatgtggttacaagtggcttgccttaaaataacacaatttgtgtgtttcgctgaatttcaggaactcctattttaagaacttcctggggttttttttttttttttaacaaagaaatgtagtactttgttttttaaaaggaagatttttattatatgaatcaatacctaataaattagaagcaaagcctcttgcagagaaaaagatccaccaataaggagatctgcgtttcttcaggggaaaaaaaaaatcatctccatcacagaattgaaaacaaaggaataatcgtacagatttgggaagctggggactttgcctttgttttccttattttaaattaggaatgctggctgatgaaatcagagcaccctgtgaaaagaactgtaccagacatcttgatcagcaccattttgggcctctgcaatgtcaaataaatttgaatatatttttgcttttacaacgttatgctagctgtgaaaccacttgaaatgcagcatttcctgacaatgacaaagctcctccacgggaaactctctttctttctaatgtgttaagaaatagacttacatcaaaaagaaaagcattctctatgaaacacaaacgctttggaagtgtctaaaggtgccacaaaggttgcaattctctctccacttgcaagaatttttttttttttttcccgagatggagtcttgctctgtcacccaggctagagtgcagtggcttgatctcggctcactacaacctccacctcccaggttcaagcaattatccagcctcatcctcccaagtagatgggattacaggcacatgccaccatgcccggctaatttttatttttagtagagacggggtttcaccatgtttgccaggctggtctcaaactcctgacctagttgatccacccacctcagcctcccaaagtgctgggattacaggcgtgagccaccaagcctggcctttttttttttttttttttttttttttaaagacagggtctcactctgttggccaggctgaagtgcagtggtgtgatctcggctcactgcaaccttgaactcctgggctcaagtgatcctcctgccttggcctcccaaggtgctgggattacaggtaccaggtgagccttcacacccggctcacttacaagattatagtgagatcaaacgtggagaacttctgatccagattcaaatggtctagatttatattctggctccctcacttactagctgcgtgaccttaatcaaatcacttaacctctctgattctgtgaccacacacataaaactgagatatgacaatgcctacctcctagaggttgtcatgagaataaactgttttaacagaagtaagacacttaggacagggcaaagctatcttgagccttactaggccaagggaccagagaagctcagatccaagcactccatactgagtggccatgctgcaaaactcccacaaaccccaaatcaacacagattggctgggcaaggtggctcgcacctataatcccagcactttgggaggctgaggtgggtggatcacttgagcccagggatttgagacgaaagaaagaatgagagagagagagagaaagagaggaaggaaggaaggaaggaaggaaggaaggaaggaaggaaggaaggaaggaagttaggaagtttattctcttactgttctggaggtcagaagccaacaatcagcttccctgggcaagcaaacaagaaagagaaaagaaaggaaataacacagatttattctcttacagttctggaggtcagaagccagcaatcagcttccctgggctaaagtcaagtggttggcagggctgattctttctggaggcactgagggaagaccttatgtccttgtctttttagccacccgtatcccctggctcgtggccccctcctccttctccaaaagtggccctcggctgggtgaggtggctcatgcctgtaattccagcacttaggaagaccaaggcgggtggatcacctgaggtcaggagttcaagaccagcctagccaacatgacaaaaccccatctccactaaaaatataaaaattagccagacgtaatggtgagcacctgcaatcccagctactcaggaggttgaggcaggagaattgcttgaacccaggaggcggaggttgcaaagagctgagatcacaccactgcacttcgtctcaaaaaacaaacaaacaaacaaacccgcatccctctaatgtttgcttccattgtcacatcgacatccctctgaccaacttctcctgtgtccctcttgtaaggatctttgtgattctattcaggacccacccaggtaacccaggatcatttccccaactgaacaaacttaatcacatctgagagtccattttgccatataagggaacgttcacaggttctagggattaggatgtataaaccttcttaattattattaatacttagccaagccttgtggggcaagagaaactttttcttttcttttgttttttggttttgttttgttgttgttgttgttgttgtttgttgttgttgttgtttgagatgaagtctccccctgtcacccaggctggagctcagtggcacaatctcagctcactgcaacctccacctctgggttcaagggattctcatgcctcagactcccaagtagctggaattataggaacctgccaccacacccagctaatttttgttttttagtagagatggggttttaccatgttgactaggctggtctcaaactcctgacctcaagtctgcctcggtctcccaaaatgctgggattacaggcatgagccactgtgcccagccatgttttttttgagactgagtctcactctgctgcccagggtggagtgcagtggtgcaatttcagctcactgcaaactcctcctcccggattcaagcaattctcgtgcctcagcctcccaagtagctgggactacaggcacccaccaccatgcctgactaatttttgtatttttagtacagatggggttttaccatgttggccaggctggtctcgaaatcctgacctcaggtgatccgcctgcctcggcctcccaaagtgctgggcttacaggtgtgagtcaccgtgcccaaacttttttgttgtgttttgtttttgagacagggtttccctctgttgcccaggctggagtgcagtggtgcggtcacagttcacagcagcctcaaactcccaagctcaagtgatcctcccacttcagcctcccaagtagctgagaccatagatgcgtgccaccacacatgacttatttatttatttagtagagacaggatctcactatgttgcccaggctgctcttgaactcctggactcaagtgattctcccacctcgacctcccaactgctggcattacaggcatgagacactgcacccagccaggacatggaaactttggaggccacattattcagcctaccacagtctcaaagtgtggtctgattccattctgttggctgttttatttcttcaggtctcagaccttacgtggacctatgggtgctacttaggacgtaggtccagccagaagtcagagaaggctactggaactgccagttcaggacccttgagctcccctgttacatgcctttgtgcaaattaggaaaaggctgtcctcccttcctctgggtagacacagctccacaccaggatgtgtggctggtgaaagggcacaggttgcatttcagcctccacatgcctcctgggtcaaacaaatttgtgcagtgcacaacctatacaaccccagtttaaggcacagggcccccacctcaccctgatttaaaaaaaaaaattagggaagcatgcccagtcttattcttgtctttctcggtataatttagatctgcacaaactttctatcatgactcacacttcctgaaaccctggagcctcccagatgtgaaatcactgagagctggctcttcagaaacagtgactcctttaacaggcgggcttggaggacgtctcttgtgggtctaggtcttataaaactgactcctgcagggctgcctgggactggtgggaaacccttggtgactagggtcagggcttcgcagagccccagcgcagggtgagattggaagaattacacttccgcccaggcgcagagccctggcacagggtaggattggaagaattacacctccgcccttcggccaacgaccaacaccttcggagtctgcagaggtttggaggagtccgaggagacttcaaggcagagctggcaaggtctgggagggagcgtgggcttgctgcgttctccccgcgccccgattcctaccctcccgaaggagtagctgctctcttgtgggaaacccatccttcagcccttccacgcatagggagtggggtgggagggagagcacagcgccctgctctttgtgaaggctgcccccacagggacgctggcaggatccaccccataaacagtacagtctgggatcaacgacacagctctgtggatcctgggatatcccccgtcatctttcattctcatttttcttggacatactaaattcgtctcaatcggaatgaaattaacaatgatttttattttccacttgggtgttttttgtttttgtttggtgcgtagtttccaaatgttcaacaactaccatgaattacttttataatcataagtcaataatattgttataaggatgtttcagggctctgaaatcccagccggtaaccccagcactttgggaagccgaggcagaagtctgaggggcttgagaccaggagtttgagaccagcctgggcaacatagtgagatccccttctctacaaaaaaaaaaaaaattgaaaattaaaaaaatagccaggtgtagtggcacgctcctgtagtcctaggtactcaggaggtggtggaggtacagggtgcagtggctcacacctgtaattccagcactttgggaggccaaggcaggttaatcatttgaggtcaggagttcaagaccagcctggccaacatggtgaaaccctgtctctactaaaaatacaaaaaattagccgggcatggtggcaggtgcctgtaatcccatctagtcagggggctaaagcagaattgcttgaacctgggaggtggaggttgcagtgagccgagatcacgtcaccacactctagcctggacaacagagcaagactctgtctcaaaaaaaacaaaacttggccgggcgtggtagcacgcagctgtatcccagctactcgggaagctgaggcaggagaatcgcttgaacccaggaggtggaggttgtagtgagccgagatcatgccactgcagtccagcctgggcaacagagtaaaacagtctcaaactaaaagagaaaaaagaaaattttcagaaaataaaaacaatccctaatagtaatcacatcccgataatactgtgtgccaagatctgacccagaactgtctgtgcacttttgttgttgttgttgttgtttgtttttattttttcatacagggtctcactctgtcatccaggctacagtgcagtggcgcaattatggctcactgcagcctcgacctcctgggcttaagtgatcctcccacctcagcctcccaaatagctgggactacaggggcgcatcaccgcacccagctaattgttgtaatttttgtagagacagggtctcaccatgttgcccaggctggtttccaactcctggattcaagcaatccacctactttagtctcccaaagtatcagaattataggcgtgagccaccgtgagtagttctttttgtcagaatggcatttttcaggatatgcttaattggttagaaactaaaatgtggtacacccacacaatgggatattagtcagccacaaaaaggaatgaagtactgatccatactacaacatgactgagccacaaagacatgccaagcagaagaagaggcaaaagaccacacaatatatcattccatttatatgaaatatctggaataggccaatatacagagatggaaactacattcgtggttacctaggactgaacgacttgggggattagggagtgactgaatggatacagatacagaatttcttgttggagcccagacatggtggctcacgcctgtaatcccagcactttgggaggccgaggcaggcagatcacctgagttcaggagttcaagaccagcctggctaacctggtgaaactctgtctctaccaaaaatacaaaaattagccaggtatggtggggggtgcctgtaatcccagctacttgggaggctgaggcaggagaatcacttgaacccaggaggcagaggttgcagtgagccaagatcatgccaccacactccaacctgggcaacagagccagactccgtctcaaaaaaaaaaaaaatttcttgttggagtgatgaaaatgttctggaattgactgtggtaatggttgcacaactctggaaatatgcctgatatggtttgaatctgtgtccccacccaaatctcgtgtccagttgtaatacccagtgttggaggaagggcctggtggcagacgattggatcggggggtggagttctcatgaatgggttagcaccatcccctcagtcctgttctcgtgatagtgagttattattttgagatctgcttgtttaaaagtgtgtatgtgtagcacctcccccatctctcttcctcctgctctggccatgtaaagcgctggcaacccctttgccttctgccgtgattgtaagtttcctgaggcctccccagaagcagacgctgccatgcttcctgttcaacctgcggaactgtgagccaattaaacctctttacaaattacccagtctcaggtatttctttatagcaatgcaagaatgacccaattcaatgctaaaactaagtaatcgtatcttttaaattggtggattttataatatgtgaattctatcttattagagctgttcctaaaaataaaacacggtggctcacacctgtaatcccagcactttgggaggccgaggcgggcgggtcacctgaggtcgggagtcggagaccagcctgacctacatggagaaaccccgtctctacgaaaaatacaaaattagccgagtgtgatggtgcatgcctgtaatcccagctactcgggagcctgaggcaggagaatcacttgaactcaggaggcagaggttgtggtgagctgagatcatgacatcgcactccagcctgggcaacaagagtgaaactccgtctgaaaaaaataaaataaactaaaataaaaataaataaagcaaaaagcctaggggcaggaagtcgaattaccttgacttctacttactgtctgttacgtctagcacattgcctcatgacccaagacaattgcttgagctctagacatcacatgtaaattccaggcaatgaaagcaaggaaggaagaagggcatggcatctcccttgcaatgtgaattactggaacttgtgcaaacatttccatttacgcggttttagtgcggacacagaaacaaagccacatctagctgcaaagggggcttttcaatcccaccattatagggagtcatgcttgaagggggttggaagggtgttgaccaagccaatcccaaagcgaagttattaaccccactttaaagatgagtaaactgaggcgcagagagtggaagctgcctgcccaaggcctcagctattaggtggaaggaaaggaaaggagagccactgtgctcaaagattccggctcagatcaggaaattcatcaaagatgagccatcccactcacaccgagaccatactagaattagtgtgaccagttctggatatgtgtcccttaatagagccagtgaggacgtggtcagaacagagatgaggctgaggtttatgaaaggcaaacacattcaatggttaacccaggcctgaatcaggctgcctggatggacaggttgtttgttttttgttttttgggacaaagtcttgctctgttgcccaggctggagtgcagtggctcgatctcggctcacgacaacctccacctcccaggttcaagtggttctcctgcctcagtctcctgagcagctgggactacaggcacgtgccaccatgcccggctaatttttgtatttttagtacagacggagtttcaccatgttagccaggctggtctcgaacccctgaccttgtgatctgcccaccttggcctcccaaagtgctggaattacaggtgtgagccaccacgcctggctgatggacagtttttataagctgttatcaggaaggaatgcttttggctgcaataacaaaaaaaaattttttttaacctgatgaacactagctgaaacctataagaaattaattttatgcctatttttcaaggtccagaggaaggctgcctggaaccatttttctggctcaggtgagcctaaaaaccaagtccttatggaaggctcactcaaggccaggagttcaagaccagcctgggcaacacagcaaaaccccatctctaaaaaataaaaaacaaaattagccggcgtggcgacatgcatctgttgtcccacctacttgggaggctgaggcaagaggatctcttgggcccaggaggtcaaggctgcagtgaactatgattgcaccactgcactccaacctgggcaacagagtgacaccatgtctctgaaaaataaaaataaaaaaatacattttttttaaaacccaggcctctaggaatcagaggttttctgtgggtccctaaagaatgtccatttaactttattaatacttccttagagaatcagctccaaagacagctaaacataacacaagcggttagggcttcaatgtagaaactttggagggcacaaaacataataggggtgcacattggggtgacaaccagaaggaactgggaaatgtgattgctatgaaagacagcacaggctgagagtggtggctcactcctgtaatcccagcactttggaggccaaggtggacagatcacgaggtcaggagttcaagaccaacctggccaacatggtgaaaccccgctctactaaaaatacaaaaattagccaggcctggtggcacgtacctgtagtcccagcaactcaggaggctgaggcaaaagaattgcttgaatccgggaggcagaggttgcagtgagccgagatcacgccactgtcacccagcctaggtgacagagcaagattccgtcaaaaaaaaaaaaaagacagcacagtggctacccaggggagcagggagaggactgcaatggggaacacggcggggttcctggggtgcccagcaatgttctgttcttgaagcaagtggaagttaaaaggctgttgtcttatctcattaaggtagactttcgtttggtgtagctggcttccttccttccttttttctttctttttctggagacaggatctcactctgttccacaggctggagtgcagtggcactgtcatagctcactgcaacctcaactgcctctgctcaagtgatcttcccacctcagcctcccaagtagctgagactataggcacatacctccacacccaacaatttggtgtcattttctgtatatatgttttattttacaaccataggctgataaaataggctcccaggcccagcgcagcggctcactcctataatcccagcactttgggaggccaaggtgggaggatcacttgagcccaggagttcgatgctgaactcagctataaccatgccactgcattccagcctgggtgatagagtgagactctgtcttttttaacaacaaaaataaaaaataaaataaaaataaaaataagatgtgctcctctgctcctgcttcatcatccaaccctgtgtctttcttcctcctcgttgcaaaataactcctgcatctccaggttgcacatccacgtctccggcaggaagtgaagggcaaacatctagaaacatctagagtcttctccacataaagttttgccttaccatttagaaagaaaaccctcttcaggcccacaacaacctctgcctcccaggttcaagtgattcttctgcctcagcctccagagtagctgggattacaggcgcctgccaccaggcctggctaatttttgtatttttagtagagacggggtttcgccaggttggccgcagtagtctcgaactcctgaccttgtgatccacctgcctcggcctcccaaagtgctgggattacaagtgtgagccactgcacccagccaaattaattgattctttaaaccctgacatcttagagcaccgatccccaacctttttggcaccagggaccagttttgtggatgacaatttttccatgggtagggtgggtgaggtgggaatggggggatggttttgggatgattcaatgacattacatttatcaatagcttctcataaggagcgagcaacctaggtcccttgcctgcaccgttcacagtacggttcacgctcctatgagaatctaatgccaccgctgatctgacaggaggcggagctcagcttccctggctcacctgctgctcactcctgccgtgcagcccagttcctaacaggccatggacccatatcagtccatagcctgggggttgggaatccctgtcttagactactaagtcccattttcctgaattcttgtggcatcaatttttcatcagccaagcatctaaccctccagccacagcccttgaacaagcttgcctctggtacttcagctcgactaatcttctgcaaaatcagtggtaactgggccctgcccctccaccgtggatatggagaacggatgccctgcatctactcccaaggcctgcctactgtgccctggagtactgtagaagctggaaagctatttttaaaatagtaacttcaccactctcacccaaataatcaatacttaattgccaaatggttttcagtgcttaccctcctgtcttaaaatatcacgtagaccaggcgcggtcccagcactttgggaggctaaggtgggcagatcacaaggtcaggagatcgagaccatcctggctaacatggtgaaaccctgtctctactaaaaaatacaaaaaaaaaaaaaaatagccgggcgtggcagcacacacctgtagtcccagctactcgggaggctgaggcaggagaatgaagtgaacccggcaggcagagcttgcagtgagctgagatcgtgccactgcactccagcctgggcaacagagcatgactcagtttcaaaaaaaaaaaaaaaaaaaaagatgtaatactaatagaaaatttgaggctgggcatagtggttcctgtctgtaatcccaccattttgggaggctgaggcagaaggattgcttgagcccaggagttcaagaccagtctgggtaacacagtgaatccacatctctacaaaacatacaaaaattagccaggcatgttggtgcatgcctgtagtcccagctactcaggaggctaaggtggaaggatctcttgagcccatgcagtggagaccacagtgagccgagattgtaccactgcacttcaacctgggtgacagagctagacattgtctctaaaggaaaaaaaagagaggccaggcgcagtggctcatgcccataatcccagcactttgggaggcaaaggcaggtggatcacctgaggtcaggagttcaagaccagcctggccaacatggtaaaaccccgtctgtactaaaaatacaaaaattagctggatgtggtggtgggtgcctgtaatcccagctactcaggaagctgaggcaggagaattgcttgaacctgggaggcagaggttgtagtgagccaagatcgtgccattgcactccagcctgggcaacaagagcaaaactccgtctcgaaaagaaaaaaaagaaaatgaaagaaattttgaggtaacagatgaggagatgattgctatggaaaagacagtttgttactcacagttcccaagaggaaggggcatatgattccatgggggaccacacgagggagcccaagtcagttaggagaagagacagaggaggaaactgggcacgaacttttaccgtggttgccacaggaaggaattgctgatgctgcttctgaagtgaagtgttgctggggtaacactcacgaaaaaagcaggcagacaggaagcaaaagtcccttctcctggaggtgaccagcccccgtggaaggggttccgggatgcagaactttcagtgctaaaaatgggaaagatctggggaaagtgggacgagttgattaccctacttctgcagtctcctagcaaactgtcttgccagagcctaacatagaaccatctggcaaagcagaaatgtggcttgcttgtcccagcatcacaaagcagggcacaggatggtgcgtttggagctcagagacagtaactctgtaattgatactttttttttttttttttaaacagagtctcactctgtcgcccaggctggagtgcagtggtgcgatcttggctcactgcaacctctgcctcctgggtccaagcgattctcccagcctcccgagtaactggggccacaggcaagcaccaccacgcctgactaattttgtatttttagtagagacggggtttcaccatgttggccaggctggtctcgaactcctgacctcaggtgatccacctccctcagccccccaaagtgctggaattacaggcatgagccacctggcccagcctgatactgactgtttatgatcttcctggtcctctccaatccgtcctctgggctgccattgagaggagctttataagtagataaaattgatcatttcagactcttgccaaaagttttccatagttacctaccagccaaccagggtgaaatttcaactttttaatgaggtataaaatgttcctcaaagttatcctcagttacagcccagttttatctcctctcctgaacttgacattccagaaatatataaatctttgaatttttaaaaaataaatcatattctccattttctatgcttttaatacactagtccctcatccggataaaaagaagattagacgggggcagtagctcacacctgtaatcccagcactttgggaggccaaggtgggcagatcacctgaggtcaggagttagagatcagcctggccaacatggtaaaactccatctctactaaaaatacaaaaattagccagacagagtggtgtgaacctgtaatcccagctacttgggaggctgaggcacgagaatcactggaacctgggagacagaggttgcagtgagccaagatcatgctgttgcactccagcctgggcgacagagggagactctgtctcaaaccaaaaaaaaaaaagcatattaagcccccctttttagagatagagttttggtctgtcacccacgctggagtgcagtggcgcgatcacagctggctgacgcctcaacttcctggactcaagctatcctcccacctcagtctcctaagtagctggggctacaggcccacaccaccatggccagctaatttttttttttttttttttttttggagagagggtcttgccctgtttctcaggctggtcttgaactcttggcctcaggtaatccttccacctcagcctcccaaagtgctgggattacaggcatgagccactgtccgcccagccaaaccccttttttagaagaaaacatcagatcaaaagatgtgcttccactttaagaatggaagttaacttctgatcagctcaatgttagctggatttgaaggccaaagaaaattgaagcaaatgtatttttgaattacatagtatttactgttctcacgcttctgacacccaaggagaagaaagataacgctcccagtgctaatgaaacttgctaggttttctttcctgctaaagatatttatacttgaattcttttattttttaattttttagaagcagggtctcactgtatcacccaggctggaatgcagtagcttgggcagatctcactgtaaccttgaactccagggctcaagtgatcctccaacctcggtgttgagattacaggtgtgagtcactgaacccggccttaaattcattttaaggcttggaacagctttagattaattccataaatgaaaaagctgtggttgatttgaaaattagagatggtttataaaataatatcaggggatataaatgattctgcaatcatttaccaagcttttccttaaattcaaaggctaataagcttgcaaggttatctggttaaaagggtgattttgctttttgttttttttttgttgagacagagtctcactatgtcacccaggctcccgagtgcaatggttccatcatagatcactgtagcctcaacctcccgggatcaagcgaccctcccatctcagcctcctgagtagctgggaccataaatgcctgctaccacatttggctaattttttttttttaattttctgtagagatgtggtctcactatgttgccaaggctagtcttgaaaccctgggctcaagtgatcctccccacttggcctccaaaagtcctaggattacaggcataagccactgtgcccagcctgactttgctttccccactccccaccctttctactgcaacattttttcttttcaaatcaggtgatttctgacaggtcttcttcagtttttctccagcatgaattcctttgtgaagacttctgaggcaaactctaggctgtgtgggatcctattgaattcagtacctcccttccatgagctcgatggtaaatgtttactcaactgtctttccaccatgctaaaccttctgttgggcagaaactgtggctttccatcttcagattccacattttgagcacaatatcttccctatagtagacactcatcctacccttgttgaatacatgtaaaatgacttttgatgaaaccaaatttacatagagagaagggtggccacagggattcagggggaaggagggacatgggaagatattggtcaaaggatacaaacttgcagctataggatgaataggttctgcagacctcatgtaaaacttggtgactgactgtagttaacaatactgtattatatactggaaatttgctaacagagtaggccttacatattttcaccacacacataaacaggtgactgtatggggtgatgaatgtgtcaattagtttgattgtgatcatcatttcacaatgtattttaaaaatcatattgtaggttaggcacaatgactcacacttataatcccagcaatttgggaagccaaggtgggaggattgcttgagcccaggagttcaagatcagcctgggcaacacaatgagaccccatttccacaaaaaaagaaatttaaaaattgacaggatatggtggtgcacgcctagagtcccagctatttggaaggctgaggcgggaggatcactttgagcctgggagtttgaggctgcagtaaagtcgtgatcacaccactgcactccagcctgggctacagagatcgatcctgtctcatttaaaaaagaaagaaagaaaaaaaaaaaggctgggcgtggtggctcatgcctgtaatcccagcactttgggaggccgagacgggtggatcacgaggtcaggagtttgagaccagcctggccaacatagtgaaactccatctctactaaaaatacaaaagttggccaggcatggtggcgcacctgtagtcccagctactcgggaggctgaggcaggagaattgcttgaacctgggaggcggaggttgcagtgagccgagatcacgccattgtactccagcctgggcaacagagcgagacgccatctcaaaaaagaaagaaagaaatcaccttgtatatcttaagtatatacaatttttatttttaagttatgctttaataaagctgggaggaaaaaagatgttcaaatgcagccccagccaattcttattcaactttggccaagtttaggatgatctgagtttccgctgaatagcagagcagaagctatggcgtgttgtggctacaagtgagcgcgctggtgtcaagctgcttggtgagatagctgctggctgtttggccttgggaaagagattgagctcaccaggcctgaattcttttcctacagaagaatgatgttgacaacagtgcctcattcattgcatggaggattaactgaggcagtgaatgttcagtccagagtacagagctggagattttagacagaactgaaatattaggtgggctgggggcagtggctcacacctgcaatcccagcacgttgggaagcagagatggatcacttgagcccaggagttcgagaccagtctgagcaacatagtaagaccccatctctacaaaaaatcaaattaaattaaaaatcagctaggtgtgtgtgggtggggggagcacacctgtagtctcagctacctgggaggctgaggtagaaagatcgtttgagcccaggagttgaagactacagtgagctatgattgcaccactgcactccagcctggaagacagaacaagaccctgtatctaaaaataaaactttttgctgggtgcggtggctcatgcctgtaatcccagcactttgggaggccgagacagcagatcacctgaggtcagatgttcaagaccagcctgaccaacatggagaaaccccatctccattaaaaatacaaaataagctgggcatggtggcgcatgcctgtaatcccagctactcgggaggctgaggcaggagaatcacttgaacccaggaggcggaggttgcagtgagccgagatcgtgccattgcactccagcctgagcaataagactagaactctgtctcaaagaaaaaaaaaatttttttttaaataataaataattgaaatgttagctgttagagttctattctttgaaatgtggtaaatggcacttaactcacagtgttggggttttttgttggttttttttttagacagggtctcgctcgctctgtcacccaggctggagtacactggtgcagtatcagctcactgaaacctccacctcccaggtttaagggattcttgtgcctcggcctcccaagtagctgggattacaggcctgagccaccatgcccagttgatttttgtattttctgtagagacggggtcttgccatgttgcccaggctggcctcaaattcctgggctcaaatgatcccctagcctcagcctcctgaagtgccaggattacaggcgtgagccaccgcgcccagctcatagtattgttttaaggttaaaaaggtgtaatagggccaggcatggtggcacacgcctgtaatcccagcactttcggaggccaaggcaggcggatcacctgatgtcaggagtttaagaccagtcaacatggcgaaacctcgtctccactaaaaacacaaaaattagccaggtgtgatggcaggtgcctgtaatcccaggtactcaggaggctgaggcatgagaatcgcttgaacccaggaggcggaggttgcagtgagccaagatcgcgccactgcactccagcctgggtgacacagcaagactctgtctcaaaaaaaaaaaaaaaagaaaagaaaagaagagaagcagaaggggaagggaaagggagagggaaagggaaagggagagggaaagggaaagggaaggaaaggaaaggagtaataggttcggtgactccagtgatctggcataaagcaagcctttgcctgggaagtccctcacttaatgcccctgattgcctcctttagctattccggggcagatccgtcttcccaaaatgcacctcactaagcagctagtgctgccagttcttgtgtgtcactcagagaatagggttttccccaaaggaaagaccactgattatgtcaagagagctacaagccactaagcaacaatgcctttcatctccctgactttggctatgagttgctgggaaagccagtgtaacattcccaggcctggggttgtaccacctgggaaggagctggtctatggagcagagtgctggccttgagcttcttagtaacaaatgccactcaaaggacatacaagacaaggtcagccctctggtttttcagacaactgcccaggcccgctggttgtagtcctacgtccccagtgacttttacaaagagtgcagctgcaaagccgtgccactctgcagggccacatctccacagtgaagcccagatcacactctggggccatggctcagtctgctcatttgggagaaacccaggactcccagggatctagcagtaacatggaccacagtgcctgtgagggcccagcatggtggctcatgcctataatcccagcactttgggaggctcaggcagaattgcttgagcctaggaggttgaggctgcagtgagctagaacggtgacactgaactccagcctgggcgacagagcaatactctgtcttaaaaaaaattttttaaataaattgctgataacacaattctcacctgaaatgctctctctttgtagattagtgtatagcctgaattttaccattaggaaaaagaggagaggtggcattgaagcatttgttactaagcagaatgaactgcatgtgcaaagattcagaggcgacatgtgtagcagatttaagaaactcccataaattcagtatgacaagcatgtcactgttctataattttttatttttattggcaaataaaaattgtatatattttacttgttaaattgagatataattcacgtactataaaactcgtcgttttgtttgttttttgtttggtaggtttttttgttgttgtttttgagacggagtccggctctgtcacccagctggagtgcaatggcgtgatctcagctcactgcaacttctgcctcccgggttcaggcgattctcctgcctcagcctcctgagtagctgggactacaggcgtgcaccaccaggcccggctaatttttggatttttggtagagacagggtttctccatgttggtcaggctgatcttgagctcctgacctcaagttattctcctgccttggcctcccaaaagtgctaggattacaggcgtgagccaccgtgcccggccaaaatttgccgttttgaagtctacaactcagtgggttttcatgtattcacaatgttgggtgaccatcaccactaactcaagcacattttcaccaccctgaagagaaactctgtacccatcagcagccacttcctgctttccctttcccccagcccctggcaaccaataacctactttatatctctatggatttgcctctctgaacattttatacaactggaaggatacatttgtcgtgtgtgtgtgtgtgtgtgtgtgtgtgtgtgtgtgtgtgtgtgtgtgtctgtgtgagagaggggagaggggagagggaaggggggagggggaggggggaggggggagagagagagatggtcttgctatgttgcccaggctggtctcaagagttcaggcctcaaacgatcctcccacttcagccacctgagtcgccgggattacaggcccatgccaccaagcccggctaatttttaaaaaattttttagagatatggtctcactacaacatttatcctttaatgtctggtttcattcgaggttcattcagatggccaaggctgctgtcactggggaccttcctgaagggacagcaaatatcatgaccaataatgcaatctgccataccttggcatgacaatactgtttccagatattgtcactatttcttctccatactattttttttttttgagacagggtcttgttctattgtccaggctgaagtgcagtggtacaatcttggttcattgcagcctcagccttctggactcaagcgatcctcccacctcagcctcctgagtagctgggactataggtgtgcaccacaaaacccggctaatttttctagtgttttgttgttattgttgtttgtagagatggggtttttgccatgttgcccaggctactcttagactcctgtgctcaagccatcctcctgcctcagctacccaaagtgctgggattacagaagtgagccactgcacctggcctatccatagtctttgttgttttttaaccctgtccctttgaggtttatgctattgagctgtactgcttccacttccccttagcaagcctcctagacagatctgttttggggctttttttttctttttttttttttttttttctttgacagagtcttgctctgttgccaccctggaatgcagtggcatgatcttggttcacttcaacctccgcctcccgggttcaagtgattctcctgcctcagccttccaagtagctgggactataggtgcacaccaccatgcccagcttatttttgtatttttagtagagacggggtttcaccatgttggccaggctggtcttgaactcccgacctcgtgatccacctgcctcagcctcccaaagtgcatgctgggattacaggctgagtcaccgcacccggcctttttttttttttttttttcttagagacaaggtcttgcttgattgcccaggctggagtgcagtggtgtaattacggctcactgcaggcttgaactcctgggctcaagcagttctcccatctcagccccacaagtggctgggactactggtgcgcaccaccacaccaggctaactttataaattattattattattattattgtagagactaggtctcacctttttttttttcccccccagaaacaagatcttgctctgttgtccaagctgtagagttgtggtgccatgatagctcactgcagcctcaatctcctgcgctcaagtgatcctccctccttggcctcctgagtagctggaactaaaggcacatgccaccacacctggctaatttttatgttttgtagggatgaagtctcgcatgttgcccaggctggtctcaaacttgaactcccagcctcaaacaatcccctctccccaccaaagcctcccaaagtgctgagatttcaggtgtgagccaacgcgctgggccaggtcctcttctcccttgctctccacggtctacttggaaatctgagagtcggctgcgtgcaatggctcatgcctgcaatcccagcactttgggaggccaaggtgggcagatcacctgaggtcaggagttcgagaccggtctggccaacatggcgaaaccccgtgtctactaaaaatacaaaaattcgccgggcatggtgggtgagcacctgtagtcccagctgcttgggaggctgaggcaggagaattgcttgaacccgggagtcagaggttgccgtgagctgagatcacgccattgtactccagcctgggtgacagagcaagacttggtctcaaaaaaaaaaaaaaaaaagaaaagaaaaaaagaaaagaaaacaaacaaaaaaaagaaatccgagagtcatccttcactcctccctcttccttactcccatagcagacctcttggaatatcctggaagttctaagcctgtcacttctcagtccccacagaagtcacactctcccaagccaccatcatctctggcttgaattactgctgcaggagccttccaagtctggctcctacaattaattcatgatccacccaacaagcacagaacgtcaagtcactcctctcttaaaatcccccatagcttcccgttttcccttaggaagagtctaaaacccttaactttttctagaaggttcctccaggaggtctctacttgctgtctcagcctcggactctctgtgcttcttcagcgtcctgtgctggcactcaattactttaggggtttcatgacacggttctctccctcccactccttttcatccttagggtcttagcttgctccccgaggcctccccacccagtagttctcagtccccgtgtgcccacagcgccctctactgccccttcccaaacacgcagcatgggtgtgtttgcccagcgcctctctgcacacccagacttcaagctgcaagatggcaagcactgcctcctccactgctaagtacctggcaaagcaattgtagtcagtaaattttttttcccattttttttaattttttttttttttttttaggtaaagaaaggcatttattaggtctgggcatggtggctcatacctgtaatcccagcactttgggaggccaaggccagtggatcacttgaggtcaggtgttcaagaccagcctggccaacatggtgaaaccccatctccactaaaaatacaaaaattagctaggggtggtggtgcatggctgtaatcctagcttctctggaggctgaggagggagaatcgcgtgaacccaggaggcagaggctgtagtgagccgagatcgcgccactgcattccagcctgggcgatggagggagactctatctcaaaaaaagaaaaaagaaaagaaaggcatttattagagaaggcatgaaaatacgttgcaagagtgcaacaggcagcactgcagagaaggggctgtctcctctcagtaaatatttttttcaattaaagaatgagtttatcatacaagaagcctggagaaaagaaatggtaaaggttgtgaaagttgtcagagtcaaaatggagtcaccaggcctggcacggtggctcaagcctgtaatccctacactctgggatgccgaggagggcatattgagttcaggagttcgagaccagcctgggcaacatagtaaaagcctgtctctactaaaaatacaattagcctagtgtggtggtgcgtgcctgtaatcccagtttctcaggaggctgaggtgggagaatcacctgagcctgggaggttgaggctgcagtgagctgagatcatactgctgcacattccagcttgggagacagagcaagaccctgtctcaaaaaagaatggaactgaaaaaaataaataaataaaccctgacacgggagttcaagaacaccctggacaacatagcaagaccctgtccccctcccccccaaaagaagatgaagaaaattagttggatgtggtagcacacacctgtagtctcagttcaaggctgcagtgagctatgatctggcccctgcactccagcctgggtgacagagcaagactctgtttataaaaaaaaaattataaaaatttttaaaaaagaaaaccctgacagatagagatggggaaggccatgaagagaagattctcagggttgggtgcctgatcacaaaaactattacaaaagactccaactctgcaaaacccacaaccttgcatacaccaaaaatacttctgcaagaacatcttcccagcaattgcctatccaacttcaaactggcatcatacccgttactgatctttgtagccaagaataattatctcaaaacaattatgtactgctcctcattttttgtttaaaaacctttgacaggccgggagtggtggctaaagcctgtaatcccagcactttgggaggccaaggcgggcagatcactgaggttgggagttcaagaccagcctgaccaacatggagaaaccccgcctctactaaaaatacaaaattagccgggtgtggtggcgcatgcctgtaatcccagctactcgggaggctgaggcaggagaatcgcttgaacgtgggaggcaggggctgcagtgagctgagatcgcgccactgcagactccagcctgggccacaagagcaaaactccgtctcaaaaaacaaaacaaaacaaaacaaaaaaagctttgtctccctttgcctcccggaatatacacagagtttactgtgacaactgcattcctattgcaatgctctgttcctgagtaaatacctttttcttttagaaaagctctgttatttaggttcacatgattaatagatgcaatggttaatgattactagataattaatattaatggatgattaataattgagtaatagatgtcatggataataattatgaattatgattaaattagcttcctgaatgtattagtctacttgggttgctgtaacaaaatacctttgactggataatttataaataatagaaatttggctggatctggtagtgtatgcctgtaatcccagcactttcggaggccaaagcagaaggattgcttgaggctgggagttcgagaccagcctgggcaacatagcaagactccatctctacaaataaaacattttttaacactttggaaggccgaggcaggcagatcacgaggtgagggaccgagaccatcatggccaacatggtgaaaccccgtctctactacaaatacaaaaaaaattagctgggcgtggtggtgcatgcctgtcatcccagctacttgggaggctgaggcaggagaatcgcttaaacccgggagacagaagttgcagtgggccgagattgcgccactgcactccagcctgacgacagagcaagactccactctcaaaaaaaaaaaaaaaaaaaaaaaattaaattagccagccatggtggcatgagcctgtggtcccagctactggggaggctgaggcaggaagatcacctgaacccagaagattgaggctacagtgagccgtgatcataccagcacactctagcctgggtgacaaagtgagaccctgtctcaataaaaataaaaaaaaatcatagagcctggtgtggtggctcacgcttgtaatctcagcactttgggagaccgaggcgggtggaacacttgaggccaggagttcgatatcagcctggcaaacatggtgaaacttcatctctaccaaaaaacaaaatatatatatatatatatacacacacacacacacacaaagtagccaggcgtggtggcatgcacctgtagtcccagctacttggaaggctgaggcatgagaaccctttgaacccaggagggagaggttgcagtgagccgagactgcgccactgtgctccagcctgtgtggcagtgagaccgtcaaaaaaaaaaaaaaaaagcaaaaaataaaaagactaggaatttattgcttacagttctggagactgggaaatccaagatcaaggtgcccgcagatttgggatctaatgaacacccattccctgtaaatggcactttctatgtatcttcacctggcgaaagaaaacgacagctctctggagcccctttctaagggcattattcccattcacgagggcagagccctcatgacaccatcaccttctaacaccatcaccttctaataccatcaccttggttctctggtttcaacaggggaattttggagggtcacaaatattcaggccataccactggcttataaagagaagcagaacagggctggaagcccagacacccacgcccacccctgaattaccattagttctcaactcacctgacatcattccctttcagtgtttcctatgttttttttttttttttaaagacagggtctcgccatatggcccaggctggtcttgaactcctgggctcaagtgatcctcctgtgtcccgaattggtgggttcctggtctcactgacttcaagaatgaaactgcggaccctcgcggtgagtgttacagctcttaaggtggcgcgtctggagtttgttccttctgatgttcggatgtgttcggagttttttccttctggtgggttcgtggtgtcgctggctcagaagtgaagctgcagaccttggtggtgagtgttacagctcttaaggcggcgcatctggagttgtttgttcctcccagtgggctcgtggtctcactggcttcaggagtgaagctacagaccttcgcggtgagtatcacagctcataaaagcagtgtggacccaaagaatgaccagtagcaagatttattgcaaagagcaaaagaacaaagccgccacgtcgtggaaagggaccccagccagctgccactgctagttcgggcagcctgcttttattctcttatctggccccacccatgtcctgctgattggtagagccaagtggtctgttttgacagggcactgattggtgcgtttacaatccctgagctagacacaaaggttctccacgtccccatcagattagttagatacagagtatccacacaaagttctccaacgccccaccagagtagctagatacagagtgttgattggtgcattcacaaaccctgagctagacacagggtgctgattggtgtatttacaaaccttgagctagacacagagtgcccattggtgtatttacaatccctgagctagacataaaggttcacatccccaccagcctcaggagcccaactggcttcacccagtggatcccgcactggggctgcaggtggagctgcctgccagtcccgcgccatgcactcgcactcctcagcccttgggtggtcgatgggactaggcaccgtggagcagggggcggcgctcatccgggaggctcgggccgcacaggagcccaccgagggggtgggaggctcaggcacggcgggccgcaggtcccgagccctgccccgcgggaaggcagctaaggcccggcgagaaatcgagcacagcgccggtgggctggcactgctgggggacccagtacaccctccgcagccgctggcccaggcgctaagcccctcattgcccggggccggcagggcctgccggctgctccaagtgcggggcccgccaagcccacgcccacccggaactccagctggcccgcaagcgccgcgcgcagcccgggttcccgctctcgcctcgccctccacacttccctgcaagctgagggagccggctcccgccttggccagcccagaaaggggctcccacagtgcggcggtgggctgaagggctcctcaagtgccgccagagtgggagcccaggcagaggaggcgcggagagcgagcgagggctgtgagaactgccagcacgctgttacctctcactcctgccttggcctccctaagtgctgtgattacaggcatgagccaccacacctggccccttctatgcctctagacctcatgaaatgcccttccgtgctatgcctgttgaaagaaagccagtttctcgcttgagagagtgtgtcccttcctctgccctccctaactcctgttgtctcgcctctcccacagtcctcctgggtgcatccccgagtcctttccttttacccaccctgagactcccacagctctctcagtggagtcctccgcagaagtctggagcctcaccaggatgttgcctgtccccgagctcatttctgagtagaaggatttgaaaccctcagaaatgacaccctgaaaaaagaaacagaatgctgcacccgtgagacacatcccaggcctgggcttgttaggtctgtctgccaaaccaggctgtgctttgggtgtgaggtggacagctttgcaaagcccactcccccgtgtcaaatcgtagttcctccctctgggctaaaaagggagtggtctgaaattaaggcactggaggctgtgtttgtctgcgcaggctgccatagcaaagtgccacagactgggtggcttaaacaacagaaatttattttcttacaatgctgaaggcttggaagtctaagatcaaggtgttggcaggtttgatttcttctgaggcctctctccctggcttgcagtccgccgcctactcactgtgtcctcacatgttctgttatctatgcatacacatcccttctgtctctctgtgtctaaatttcctcttcttggccaggcatggtggctcaggcctgtaatcccagcattttgggaggcagcatttgggaggaccacttgaggccaggagttcaagaccagcctgggcaacatagtgagaccctgtctatactaaaaatacaaaaattagccagttgtggtggcacatgcctgtagtcccagctactcaggaggccgaggcacgagaattgcttgaacacaggaggtggaggtcacagtgagccgagattgcgccactgcactccagcctgggcgacagagtgagactctgactcaaaattaattaattaattaaagacatcagtcagtttggaattggacccagcctcatgaccctattttaactttatcacgtctttaacagccctatttctaaatacagtcacattctgcggtactgggggttagggcttccacatatgaatttgggggagggggaacataagtcagccataacagagacagtccttggttttaggatattaccaatccttcagggttctctgaataagagcaataaccagtggaagaataagtaaataagtgtcatgtctgaaagctagagacaggatacaattaatttttaaatgaataggtacaggctgggtgtggtggctcacacctgtaagcctagcagtttgggaggccgaggccaggaggatcacttgagctcaggagtttgataccagcctgggcaacacagtgagaccttgtctctataaagaaaaaaatttttttgaccaggcacagtggctcctgcctgtaatcctagcactttgtgaggccaaggcaggcggatcacctggggtcaggagttcgagaccagcctggccaacatggcaaaaccccgtctctactaaaaatacaaaaattagccaggcgtggtggcacaggcctgtaatcccagctactcaggaggctgaggcaagagaatcacttgaaccagggaggcagaggttgcagtgagccaaagttgcagtgagccgaggtcgcgccattgcactccagcctgggcaacagaatgagactctatctcaaaaaaattttttttaattaaaaaaaaaagaatacatatgaataattgtatgtcagctagctttttctttctttctttcagatggagtttcactcttgttgcccaggctggagtgcaatggcgtaacctcagctcactgcaacctctgcctcctgggttcaagtgattctcctgcctcagcctccggagtagctgggattaaaggcacccaccaccacacccagctaattttttgtatttttagtagagacagagtttccccatgttggccaggctggtctcgaactcctgacctcaggtgatccacctgcttcggtctcctaaagtgctgggattacaggcgcgagccaccacacccaaccaactagctttttaactcaatgaaagagagcagaggaggcctggggtccacacatctgggtccttcgcctggttgtgccactgttaaaggagagacagtacgatttaaagagactggaagataaataaaaaggaaggttccaaattgcaggaattagtatctccaaacagcctcaatccttttggaactgggaagcaggcctgaaggactgaatgataaaattagtagtaactcagtataaagcagaatatttctttccaactctgaggactgtggtgcacatttgatggaaagatgggaagaaaatcaaatgcactaaacttgttccaggggcaagcacagcaaagtatctgccaagaaggggggatcccaaagagaaaatttatcagcctcagttttgcgtggggttagccttgttcacaaggaatcccaggtatcctgccaatagcatgggatacattgttatgggacagataatgctaagtacatagtatcagcatgaagatctagagaatatcttcatacattacatggcaggtttgattgtgaaatttttattttgtttcgttttattttattttattactttgagacagggtctcactctgtcgcccaggctggtgtgcagtggcgcaatcacagctcattgcattctccacctcccaagttcaagtgattcgcctgcctcagcctcctgagcagctgggacaacagtcgtgcgccaccacgcctggctaattttttgtattttttgtaaagacagtgtttcatcatgttacccaggctgctctcaaactcctgggctcaaacaatccacccaccttggtctcctaaagtgctgggattactggtgtgagccatcacaccctgctgattatgaagtttaaaaagttaagtcctggccgggcgcagtggctcatgcctgtaatcctagcactttgggaggccaaggcaggtggatcacttgaggtcaggagtttgagaccagcctgaccaacatggtgaaacgccatctctactaaaaacacacaaaaaattagccaggagtggtggtgtgcacctgtagtcccagctactcgggaggctgaggcaggagaatcgcttgaatccaggaggtggaggtcgcagcgagccaagattgcgccactgtactccagcctgggtgatagagcaagattccgtctcaaaaaaaaaaaaaaaaaaaaaaaaaaaaagttaagccctctgtatcacgtgagtttgtatgcttgggtagaggtacagctctccattgttcctgggcacacagtaagactaaatgaagggagttttgactgggaagcgtgtgttttccattgacatgttcccaggcatgtgtggacatggctggcgtgggcctcaggagtaaggcaaggggaattcaggatttcctctctccatgacacatgacagcttaggtcacgttcaagttcctttgttatatgctctcatacaattgcattcctctccttctgtcttagtccattcaggctccttatagcaaaatgccataaactggatggcttataaacaacaaatattggctgggtactgtagctcatgcctctaattccaacactttgggaggccgaggtgggtggatcacaaggtcaggagtttgagaccagcttgacaaacatggtgaaaccctgcctctactgaaaatacaaaaaattagctgggcatggtggcgcatgcttgtaatcccagctactcaggaggctgacacaggagaatcgcttgaacccaggagctggaggttgcagggagctgagatcacacccttgcactccagcctgggcaacaagagcaaaactccgtctcaaaaaaacaaaagaaagaaaaggaaggaaggaaggaaaaatatttattttccacattttctagaagctgtgaagtccaagatcatggcacagacagattcggtgtctatcgagggcccatttcctagatggtgccctctcactgtgtcctcacatagtagaagagacaaacaagctctcttgggcttattttatataagcactaatcccagcctgagcgctccaccctcatcactaatcacctccccaaaggcctcagcttctttttttattattattttttaagcgatgaggtctcactcgttcacccaggctggagtgcagtggcaccatcacagctcactacagccttgacctcccaggctcaagtgatcctctcacctcagccacccaagtagcttggactacaggcatgcaccaccatgcccagctgatttttttattttcttgtggagacagggtctctctaggttacccaggctggtctcaaactcctgggctcaagtgatcctcccaccttggcctcccaaagtgctgggtttacaggcataagccacggtgctcaaccatattaacattcttgcttgtgtgatggatgctatcactgacgaaaccctcccaggtctctggtagtgccatgaatttctaatattttcagactcaaagaaatgcccagagttcaaagaagaacaccagaacctcatttgaactcacctgcctgtccctagtgaggggcagtcatctcaaatacaactgacaatcaagttcaaatctgacacttttatcatagatttatgagctagctggtcccaggtgtgcatggcccacttctccttgtccatgatcaagacaatttgcttggtatttgctttttatttttattttttgagatagagtcttggtctgtcgcccaggctggagtgcagtggtgcggtctaggctcactgcaacaaaacctccacctcccaggttaaagcaattctctgcctcagcttcccaagttgcttggattacaggtgcctaccaccatgcctggctcattttttctatttttagtagagacagggtttcaccatcttggccaggctggtcctgaactcctgacctcatgatccacctacctcagcctcccaaagtgctgggattatagccgtgagccaccgcacccggcctgctttttatttttctaccaaagacttctgtcctcggttttcttctccctccagcccttctgacccagctggccacagaccatgatagataaagtgcagaagtcctcgctgccaagctgcttctcccttgtgactatgtccatgctaagtatttctgtcttagaatagagctacaagaattatagaggctgaagactctcattaacaaacagccctttgcatttgacaaggtgttacagaagaagaaagaagtgaattttttttttttttttgagacagagtctggccctgtcacccaggctggagtgcagtggcacaatctcggctcactgtgacctccacctcccaggctcaagccatcctcccacctcagcctcccgagtagctgggactacaggcacatgccaccatcacacccagctaatttttgtattttttgtagagatggggttttgccatgtctgatctgcccaggctggtcttgaactcctggactcaagcaatgcacctgcctaggcctcccaaagtgctaggattacaggtgtgagtcactgcgcctggccagaagtgagtattcttgatagcctcaggaaatgaaagatatattactgggcccatactcagctcgtggcaaagccacctccatcaactgcccccattccagctggctggctgtgaaattgcctttgcaaaaattgtgacagtgaaagaaatatcacgtaactgactccatcttgcttctaagctcacagctgtctttgctcattcctgcacataggccaagccaactatatgaggactttagtttatagttaactttaaaacaaagcaagccaggcatggtggctcatgcctataatcccagcactttgggaggccgaggtaggtggatcacttgaggtcaggagttcgagaccagcctggccagcatggtgaaaccccgtctctactaaaaaaatacaacaatttgccaggcgtggtggcacacgcctgtaatcccagctactttggaggctgaggcaagagaatcacttgaacccaggagacagaggttgcagtgagccaagatcacaccactgcactccagcctgggcaacacagcaagactccatctcaaaaaaataaaaataaaaaataaaacgaataaaataaagctgataacagtcccttcctgaaactaacccccttcttgctcagggactgactgacactgcctttgtataactaatgaaagacctcaaggttagaattgtggtaggggcctgaattctgctaagatgaaggcatagttaaactctaacagccattgtttcttctaagatgtggatatagttaaactctaacaagtcattgttttataacttgcctttttttgtaactgcttattactcagaaatcatatagccaatggtcacaagatttataacttccccaattcccccatggacaacatcactattgtacagtcaaagactggtatttgagacattttccagaccttgcattccgtatggaccaactggcgccacctggaccagcaactgacacccaggagctgacttagcacagaagacagtttcgatcccctatgatttcattcctgacccaaccactcagcattcctcattccctagtcccctgcttgccaaactatccttgaaaaaccctagcctccaaattcttggggatgtggatttgagaaatatctcctgttcttctcacttgactggccctgtgattattaaactttctctgctgtaactcctgctgttcttggtgtcttggcttttctgggcagcaggcaagaagaaccagttgggtgattacagcaaggatggatttcttgctcagttatgagatccttctttgtagcaggccattatccccattatcagccatccttgactgcttttgtccagaagcacacctcgcaacttgtctgaagtgcaacctacacccaccccagtaggaattgccctgggacatgactgagctcttcaggcccacggcagtgtcaactgtgagtcatgtaaaggagaaatgtcaaagaaaaaaaatgagacaaaaaatagagccaaggaagactctggggatcttccaggttgtacaaaccaaaataggtttttgtttgtttgtttgtttttgtttgtttatttgtttttttgagacagagtcttgctctgtcgcccaggcaggagtgcagtggcacaatctcggctcactgccagctctgcctcccgggttcacaccattctcctgcctcagcctctggagtagctgggactacaggcacccgccaccacgcctggctaattttttttttgtatttttagtagagacagggtttcaccgtgttagccaggatggtctcgatctcctgacctcgtgatccgcccgtcttggcctcccaaagtgctgggattacaggcttgagccactgctcctggcccaaaataggtttgggggaaggaaagagagtgaaggaattacaaacagatccatcaacaccctccttatcctcaaagtttactgtttttgttttattttgttttgttttgagacagggtcttattctgtcacccaggccagagtgcagtggcgtgatcatggctcactacaacctcaacctcccgggctcaagtgattctcccacctcagcctcccaagtagctgggactacagggcatccaccatcatgcccagctgattttttaaaatttttttgtagagatggggtctcacaatgttgctcaggctggtctcaaacacttgggctcaagcaatcctcctgtcttggcctcccagagtgccagggttacaggcatgagacactatccctggcttactgtgttttaaagaagccaaagaagtacttcagtgccctgacatgatctttgctgacagtcagatctccaggcacgttcaaaggcgatttgtcatataatgatacatccatttcaatccactggtccaggagctgcctttggggcattaggacagctgggcctcacaagccacttctgttctagcccactcctcagggcagttgacagaacacaatgagaatgttccagcaaagaagtgtatacctaaaggtgagtcacaggtactcaaaagaaagcaatactggtatgcacaaaatgaaaagcttcccggtagatattcccataccagcttcttttttgccccatcctctggcttctaacggcctcttgcatctttccttggccaattcttttctctctccatgtttattgtctcacctctcttcctctcaaccccagtccttattctcatcttctgcttcagattcctgtcttctttctttctttttttttttttttttttgagatggagtttcgcttttgttggccaggttggagtgcagtgctgcaatgttggctcaccgcaacctctgcctcccaggttcaagcgattctcctgcctcagtctcccaagtagctgggattacaggcatgtgccaccacgcccagctaattttgtatttttagtagagatggggtttctccatgttggccaggctggtctcaaactcccgacctcaggtggtctgcccgcctcagcctccgaaagtgctgggattacaggcttgagccactgcgcccggccaattcctgtctgttttcaagaaaaaggatccattcccttcttgatcgtcatgtccatcttgactcttgcatgatcaacaccctctgtcctaccctgcaatcaccctacctcttcctcctcacatttattgtccctcagtgacaaatttctcccctgttctttgcttttcaaaagcaagaactaagacaaattttgaggccaggggcagtggctcatgcttgtaattccagcactttgcgaggctgctgtgagagaatcgcttgaggctgagttcaagatcagcctgagcaacagagtgagaccccgtctccacaacaacaacaaaaaagacagaacagccaggcgtgatggcatgcacctgtggtcccagctattcgggaagctaagatgggaggatcacttgagcctggggaggttggggctgcagtgagccatgatcatgcaactgagctctagcctgggcgctctagcctgcctccaaaaaaaaaaaaaaaaattaaacttcgagattatggagagcttcctgattgttaaatatatcctcagacggggatggtggtgcactccaactctatgccgatagaagctcctgtacttacaacccttccagacctcatcctatgcacctcttcatctgttcccttgtaccctttatattaaactggtaaacataagtaaagtgtcttcctgagttctgtgagctgttctagaaaattatcgaacattatgagggaggcatgcaaaccccccgatttatagctggttggtcaaccaaaagagtcaaactctgtaaaatatttgaagagatttattctgagccaaatacgagtgaccatgacccataacacaaccccaagagatcctgggaacacatgcccaaggtcattggggcacagcttgcttttatacattttagggaaacatgagacatcaaccaacacgtgtaagatatacactggtttggtctggaaaggtgggacaactgaaagcaaggcagtggggtggaagggaggggaggtggggattccaggtcatggatggattcaaagattttctgattggcagttggttgaaagagtttaactaaagacctggagtcaatagaaaggagtatctgagttaggataagggaccaagttctttttttttttttttttttttttttgagacagggtctcactctgttgcccacgctggagtggagtggcccaatcttggctcactgcaacctccgcttcctgggtccaagtgattctcatgcctcagcctccctgtaactgggattacaggtgcgtgccactgcaagaaattttactatctattctctctgaagcctgctacctggaggcttcatctccataagaagaaccttggtctcggctgggtgcagtggcttatgcctgttaatcccagcactttgggaggctgaagcgggtggatcacctgaggtcaagagttggagactagcctggtcaacatggtgaaaccccgtctgtactaaaaatataaaaatcagcagctgggagtggtggctgcctgtagtcccagctactcaggaggctaaggcaggagaattgcttgaacctgggaggtggaggttgcagtgagccaaaatcatgccactgcactccagcctgggcacagagtgagactctgtctcaaaaaaaaaaaaaagaattttatttttggtttacattggtcagaagtatgggagtcctgggacttgcaactggcatctgaagttggtgggtggggcagttttgagcccttcagctgtggaatctgccctaactccaggtagtatcagaattgaactgaattgttgaatatccagttggtggccagagaatcagagaactggctgttggtgttggaaaacatcccaggagtccttgaagtaggagaacagagaaccaaaaagagcatgagaaccagagacagagtaaaaaggattcaaagatgagctgttctggagtttacccccttacacactcatcacctatggacaacccacctttcaatagacttggatccttataggctccctgaatggaggctggatgaattggacaccttgtgtggataaagcatgaaagaacttccacgtaaaacaagatggaaccaaacagacacaattggaaacatccctatgggcaccaatggacctacctgcactgtcccttaggtatggagtcagcaaattccactgcagtatcccaagagtgaacagggtttagcaggagatcctttcacagagaagaatccttctaggaagtgcccactgaaacatccagttaatctaagatttaggcactgagaatggagcacagaaatttttttttttttttttttgagacaggacctcactctgaagcccatactggagtgtagtggtacttacatggctcactgcagcctcaacctcctgggctcaagcaatcctcccatctcagcctcctgagtagctgagaccacagatatgtaccaccacacccaataatttgtctgatttttagtagggacagaatctcaccatgttacccaggctggtctcaaacccctgggcccaagcgatcctcctgcctcagcctcccaaagtgctggccttataggcgtgagtcactgtgcctggctgcaaattcttatatcaagacttcatccttctttctgtttataaatatctggaagttccatggagctataccagatgtcaggaagggcctcattcagagtctcatctcttgtttttcatggtaattaaaatcttaaggttggccgggcaaggtggctcacacctgtaatcccagcactttgggaggcttaggcaggcagatcacaaggtcaggggatcgagaccatcctggctaacagggtgaaaccccatctctactaaaaatataaaaaattagccaggcgtggtggcgggcacctgtagtcctagctactcgggaggctgaggcaggagattggcatgaacctgggaggcggagcttgctgtgagccgagatcgtgccactgcactccagcctgggcaacagaggtcaggctggctcaaaaaaaaaaaaattagccaggcgtggtggcgggcacttgtaatcccagtttcttgggaggctgaggcaggagaattgcttgaacccaggaggcagaggttgcagtgagccaagatgatgccatttcactccagcctgggtgagagacagagactctgtctcaaaaaaaaaaaaaaaaaaaattaaagagaatagcttcctgttggtccccagcccagagccaagcagctctgtgagtgacattaagctggatgaagatgacatagcagagcaaatggcaatgctatcttctaaccagaattgtcagtaatttacctccagccctgccaaagcccaggaggaggcttaattgaggaagggatatttgcaggccacaaatcaaaatgacataaataattatgaaaaacaggctgggcacagtggctcacgcctataatcccagaactttgggaggctgaggtggagagatcacttgaggtcaggagttcaagaccagcctggccaacatgtattttttgtagagatgaggtctcactatgttgcccaggttgatcgccaaatactggcctcaagcaatccacccacctcccacagcattgagattgtaggtgagagcccctgccccggcctcaaatttccccttttcataaggacacctgtcatattggagtagggacccaccttactccagtatcacctcatcttaactacacctgcaacaaccctatttccaaatacagtcagaggcactgggagttggcacttcaacatgtgaatctggggggtggggtacccacaccaggctcatagacaaataggtttcaaaatatgtagataattttcaattaatctgaagaccgtcaaagagaaaaattctaacagctttcagaaactaaacaacaccagacttgtcagcagcaacaacagatgcaagaagacaatggggtagtattttgttcaaagaataaaaggaaaacacttggaacttagagaattttatgtctagcagaactgtcatttaaatgtgagggtacataaagatattttcagatataaaaaagtgtcaaaaatttatcccgggccagacgtagtggctcaatgcctgtaattccagcactttggaaagccaaggtgggcggatcatgaggtcaggagttcgtcaccagcctggccagcacagtgaaaccctgtctctaccaaaaatacaaaaaaaaaaaaaaaaaattagccgggtgtgatggcaggtgcctgcagtcccagctacttgggaggctgagtcaggagcatcacttgtacacgggaggtggaggttacagtgagccaagttcccaccactacactccagcctgagcaacacagtgagactctatctcaaaaaaaaaaaaaaagtttaccccacaaaaaccttcaaaaataatcctggaggaagtattacagcgagaagagaaacaacttatgagacacagcaaataatagtgactacatttctatgataaataaataatgcccccaaaaggcatatttatacaaatccaaaatcaaaagtctaaaaaatatcaatatggcagtttcagggcaaaaggaagcagaggggagaatttatggggtagaataaacacaaattagtctgagcatgttaggaataactactataactttttaaaatttttttaaattaaataattttcaaatcagaagtagaaaataatcaatgtattcatggaagcaaggaaaggagaaaaaaagagagtatggtaaataaaagactgaaaagagtccaaaaaaaaaagtcttttgttgttgttgctgtagagatgggatcttgatctgttgcccaggctggagtgcagtggctcagtcatagctcactgcaaacttgaccttctgggttcaagcaatcctcttacctcagcttcccaaggtgctgggattacaggcatgggccactgcacctagccaggaaaatgcatttaaacctgggctttcaagaatttccttagggctggccacggtggctcacacctataatcccaacattttgggaggccaaagtgggaagatcaggagttccagatcagcctggccaacatggtgaaaccttgtctctactaaaaatacaaaaattagctaggcgtggtggcaggctcctataatcccagctacttgggaggccgaggcaggagaatcgcttgaacccaggagggagatctcggttgcagtgagctgagattgtgccactgcactctagcctgggcaagatagcgagactccatctcaaaaaaaaaaattcctcatataaaatcccaaggaacataagttgatattttaaaaaatcactaacaggaaataaactacataagcagaagcaataagcctcagaatcagactcacaaatggcacagccactggaagtatgctgtacagaatataaaataaatacagtaaatctttaaagaaattaatggcagagctttaaaaatactgaaggaaaagctgattattaaaactgtcaaggaagatttgaagaggaaaaactaaaaattatataagtgaaaactttaaaacccagtgaacaaatgaaatcgattacagcacagctaaaaagaaaagaaactaggcacatattggaagaaattatacagggtgtggccaggcacagtggttcacacctgtaatcccagcactttgagagcctcaggcaggaggatgacttgagcccaggagttcgaggccagcctgggcaacatagcaagacctcgtctctactaaaaatttaaaaaattagccaggcgtggtggcgtgtacctgtggtctcagctactggagaggctgaggtgggaggatcgcttgagcctaggaggcagaggttgcagtgagccgagatcgcaccactgcactccagcctgggcaacagattgagaccctgtctcaaagtcaaaaaaaaaaaagaagaagaaaagagagagattgttagagatagtattagggaacctggcacttgtaaggagaaaagtaaagttagttccccacctctctccataatacaaaggtcaaataaatgggctagaaacctaaataaggaaggtaaaaccagaaggctaggactgtatgttaatttcctagggctgccataaagtaccacaaactgggtggcttaacccaacagaaatctattgtctccccattcctggaagccagcagtccaaactcaaggtgtcagcaaggccatgcccgctctgaaccctgcaggggaatccttcctcacctggtcttagcttctgatgatttattggcagcctttggagttgcttcgcttgtagctgcataactctaatctctgcctttgttgtcatatggcattccgtgtgtgtgtgtgtgtgtgtgtgtgtgtgtgtgtgtgtgtgtgtgtgtgtcctcacatggctatcttctttttatttatttatttatagagacggggtctcactgtgttgcccaggccgatcttgaactcctgggctcaagtgattctcccaccttggcctcccagagtgctgggattataggtgtgagccacggcgcccaaccaggctgtcttcttataaggacaacagtgatacggcattagcagcccaccctactctagtatgacctcatcttaactaattacatctgcaacgaccttgttttaaatacagtcacattctgaggtactgggagtaggaattcaacatatccttttggaagaacacaattcaacccataacagctgctagaaaaatgtagaatattgttatggctttggagtgagcaaagattcttcaacccagaaagcacatatggtgaaaatgtgacgggtttgactacatgaaatttaaagatttcttccaaacaaggacatcagaacatcattgaaaaaattaacacagctgggcgaggtggctcatgcctgtaatcctagcactttgggaggccaaggagggcggattacttgaggtcagaaatggcgcatgcctgtaatttcagcaccagcctggtcatcatggcgaaactcagtctatactgaaaatacaaaaattagctgggtgggcatagtagcttatgcctgtaatcccagctactagggaggctgaggcaggagaatcacttgaacccaggaggtggaggttgcagtgagccaagattgtgccactgcactccagcctgggcgacagagcgagactccatcttaaaaaaagattaaaaaataaaaagttgacttgatattagtcaagggatacaaaatatcagttatgcaagatgaataagttctagagatctaatgtacaatgacacgactatcgttaataagattttattgtatacttgaaatttgttataagggtaggtcttaagtgttctcaccacaaaaaaaaaaaaaagctccccaactcattgaatagggctagcattccgccaatgtcaaaactaggcaagaataacaccagaaaattccatttatgaaaacaaatgcaggccaggcacagtggctcatgcctgtaatcccagcaccttgggaggccaaggcaggtggattccttgaggccaggatttggagaccactccggccaacatggcaaaaccccatgtctactaaaaatgtaacaattagctgggcacagtggcatgcgcctatagtctcagctctggaggctgaggtgggagaatcgcttgaacccaggaggtgggtgagctgagatatcaccactgcactatagcctggatgacacagcaaggctgtctcaaaaaaaaaaaaaaaagaaaagaaaagaaaagaaatgcaaaacaaccctaaataaagtattattaaatcaaatccagcaatggtgaaagcaagaaagaggagataatcaacattaatggattaaaggcagaaaaaccatctgattgcataaataaatgcataaaaagcatttgataaaatgtaacacctgcatttaaaaaagaaagaaagaaagaaagaaagaaaaatctctagcaagttaggaatagaacctgataaaggacttctactagaaatctactgaaagcatcatatttaatgatgaaaccttaggatcattcccttaaatgtctaggacaagacaagaattgtccattaataccactgccattcaacattgtattggaactcctagccaaagaggagaggattaagaaaaaaagcatagacatcagattttttaaagctgtaatttttttcttttttctggacaacaggatcatctagctagaaaatcgaagagaattatctgtcaagctattctagaacaagcaagagtgagttcaacaaggcagccaaatccaagataattttttttctttttttttttgagatggagtctcactctgtcaccaggctggagtgcagtggcgcaatctcggctcactgcaacctctgccacccggttcaagcgattcccctgcctcagcctcccgagcagctgggattacaggtgactgccaccatgccctgactaaatttgtatttttagtagagacagggtttcaccatgttggccaggctggtcttgaactcctgaccttgtgatccacccgccttggcctcccaaagtgctgggattacaggcgtgagccaccgcaccgggcccagagacaacctgttctgcagcccatttgcttcttccagagtctccctctgtcgtccgggctagagtacactggctcgatctcggctcactgcaacctccgcctcccaggttcaagcgattctcctgcctcagcctcctgagtagctgagattacaggcacctgccaccacgcctggctaatttttgtatttttagtagagatgaggtttcaccatgttgtccaggctggtctcaaactcctgacctcaggtgatttgcctgcctcagcctcccaaagtgctgcgattacaggtgtgtgagccaccgcccccaccctctatttgcttctttgagatgaatcaccccataaatgattggtaaacagagtaatgatgtcagcataacacaagcatgttggttaacatgcaattttctccaggaagttaacattttgaagcaatcagggccaagctttctcacagttaaaggggaagccttagtactaaaagaagatcttcagaggaaaaagctgcaaatctacagaagtgtcttcctttggatccacggtggctggtttagtgacttcaaagaccaccatatttgtcacagtgttatgcctatggcaaatccatgaatgcagatgaagaaattgcaaatatatttctcccatattaaaataacagattaatgaaaaagatcacaccttggatcacatttcgagttttgatgaaaatgatccccatcaatagttaatatctccaaccagcatccccaaagaggaagcataagccccaccttcaaggctgcaaagtgctgctgaaagcaaatgctcatggaaatttacctattctagtgtttctattagcatcattattggttttgtagcactctgaatataaagttgtatacaagaggccgggcatggtgcctcacacctgtaatcccagcactttgagaggccaaggcgggcggatcacgaggtcaggagatcgagactatcctggccaacatggtgaaaccctgtctctactaaaaatacaaaaattagctgggcatggtggcgcccacctgtaattccaactactcggaaggctgaagcaggagaatcacttgaaccagggagtcggaggttgtggtatgccaagaccgtgccactgcactccagcctggcaacagagtgagactccatctcaaaaaaaaaaaaagttgtatacaggtttttatttttacttttttttttttgagtcagggtctcgctctgtctctcaggctggagtgcagtcagtgccacaatcacagctcacagtagcctcgacctcctgggctcaggtaatacccctatacctcagtctcccgagtagctgggaacacaggtgcacaccaccacacccgcctaattttttatttttttgtagagacggagtctccctatgttgcccaggctagtctgaaactcctggactccagtaattctccctcctcggcctctgaaagtgctgggattacaggcatgagccaccgtgcccagctagttgcatatattttgagcaatctgtctctaactctattttttccatgaagtcttgttaattttagtgcaccgttttgaagaactgaaggttttttaagaatgcatatagcaggttatagcagaaacacttatactcagaatgaagctggggctctctcttccaacaagcatttttgatatgctccgagtgtccctgctaggtagccaggagaccaggtaacccacttccctctgacaatggaacaattccccaaggaccctgaggggcagttctctggagtttgggcactagagtccctcttatttcctcttcttctctcctccctctagaccccataccactcaggagaggccaagtaaaaagacccagaattttgcctcttacaagcttagagatcttgaagaagtcactgaacctctgcgggacctactttcctcattctttaaatagaaaggcagtgggttttttgtttgtttgttttttgttgtttttttttttgttgttgttgtttttgttaatcgtggcgatggttatttatttatttatttattttgagacggagtcttgccctgtcgtccaggctggagtgctgtggcgtgatcttggctcactgcaacctccacctcccaggttcaagcgattctcctgcctcagcctcccgagtagctgggatagattacaggcgcacaccaccacgcccggctaatttttttttttttttttaaatagtagagacgggggtttcaccatgctggccaggctggtcacgaactcctggcctcgtgatccgcccgccttggcctcccatagcgctgagattacaggcgtgagccaccgcgcccggcctggttgttaatttttaaaactgcctttcatttttgctttgccatttatagctctgtagccttgcacaaatgacttcacttctctatgagtcatctgtaaaatggggctctttgtgaagacttaacgataccacgtgtacaaagcactgaatacaacatgcacattaagctccccgaaattgaaactcctataaaataggaatcggggattctcaagagcaggagttctgacttcagcagaggaacccagagctggtggggaaagcagacgtggctgtgacatccccagggacactaaacacatcctcccagccccatcttccccgcagagtcccgccaccggcccgacccctaacttgctccaaccacccgccgacgcccgcagcccgctgtttgggggccgccccctgcagcgccaggtccccgcgcggactacagttcccagcgtacatctcggtcggggggtccgaggggccgtcctgcctcagggataaggtccaggctgcgttcgcggctccgggcagtcacagtcatgcacgcagctcctatttttcgcgttgctaatcgcgtccgttgcagtccaacccatcctgggccgcggcccccacagggtctgtgaggagcgcttccccccgccccgggcgcccgctacgccgcgtccgaaggaggggccgaggccgggctcatctccccgggaggactccttcggcttcgtggggtgtcatgtccattgcggcccgaggctggccgcggggctctgctggagggcgctgagagccgggccccgaggccgcacggccggagactacaactcccaggaggcaccgcggcggcggcgcccacacgtcactcgggccccgccggtggcccggggaagcagcacgggcggggggcaggggctggggccgaccgggaggccggtgccaaggatgggggccgcccggctgccccgcgcgtgaggaggccgaggggcgcgccaccccggcccggggcggccgccccaggggccccgccacccccgcccggcccggcagtcgtggcccgggatgcggagccgggggccgccggtggagctgcgcggggtgagcggcgcggggaacggggactgcctgccgccctcgccctcgtcccccaccggcggaccccggcgggcattcgagagccgcgcggccaggccctcttagccctctgccgtttggggggcacgggtgaacctgccgccccactcccaccccgccccgccccgcccgtacagccaaatcggaagggacgagcctgccctttgaaagggttttttttcttgctcctgcggagggcgccccagccatggccctcaggagctccctagaccccgcagggactgccctccatcccggccgccggggcccgccctctgcatcccgcgggcagcctgtgtgaagcggcctcccgcagcccccggcccctcccccatggaggaggaggagggggcggtggccaaggagtggggcacgacccccgcggggcccgtctggaccgcggtgttcgactacgaggcggcgggcgacgaggagctgaccctgcggaggggcgatcgcgtccaggtgctttcccaagactgtgcggtgtccggcgacgagggctggtggaccgggcagctccccagcggccgcgtgggcgtcttccccagcaactacgtggcccccggcgcccccgctgcacccgcgggcctccagctgccccaggagatccccttccacgagctgcagctagaggagatcatcggtgtggggggctttggcaaggtctatcgggccctgtggcgtggcgaggaggtggcagtcaaggccgcccggctggaccctgagaaggacccggcagtgacagcggagcaggtgtgccaggaagcccggctctttggagccctgcagcaccccaacataattgcccttaggggcgcctgcctcaaccccccacacctctgcctagtgatggagtatgcccggggtggtgcactgagcagggtgctggcaggtcgccgggtgccacctcacgtgctggtcaactgggctgtgcaggtggcccggggcatgaactacctacacaatgatgcccctgtgcccatcatccaccgggacctcaagtccatcaacagtaagtggtgtcctctccccaaaattccttccacagaacctctcaaggccaggcctaggtggtgggaaacagggtgagggacaccagatgacactgtgcctggagtgagaaggggcagcagtatgataccttcagggtgaaggtgaggtaggccttgcctgccttaagggagaaaaaggaggctcagaaaggttgaaggacttacctgcctcccaggctgcagagtcacaatcgctcagtaaacatgtatccatgaacacctgcgttccctgcatgaacaggacagatgcagtgcctgccttcaaggtgcttgccatccagccatgctgccagagtccaccaggcagagacaaaaagagcctaccccgtctggagtcagtgtctctcaaccccagcactattggcacttgaggccagatcattgttgtaggggctgtcctgtaaattgtgagttgcttagcggcatctttagcctcttcccactagatgtcattagcattccctgccccctctccccagctatgacaaccaaaagtgtctccaggcattgcaaatgtcccctggggggcagaatcacccccagttgagaaccatttcctggagtcttcataggccgagctggccaaggcaaactggaaaagatgagggaggaattaaattgatgtggcttatataaaagcttccaggctgcctgataggttctccaaagttgattggttggttgaataaataatggagccaggtagaagggaacattctgcaagactcatttctagatggaagagcttcatgtggtgtcaacaagtattaattgagcacctattaagcaggagcccagctgggagtaagacagccatggtttctgccctgacagtactcacaggctagcaatttcattcattcattccacagatatttccagagtgctgtgtgccagaccctgtcccagggatacagcaagaaaaaaaaaatcttacattcctggctctcccattcgtgctgtgccccatctcactccctttcatttcttcattcatttgttcattcttccatttggtatttaccaggccagatcatgtgctaagcaaaggcatcagcagtggagaaggccagcatgtccccggccctcacgtcactcacagttaagccccaaaatgtgaaggtgccccctttgctctcaacacccacatctcatctattcctgatttctgtcacttctacatcttgaaatttattttaatccatcccactatttttaggaatatattgctattccccacccatagcaattgtaagcccctagaatagagggactgcatcttccttgcctcccaagcctgacatttgtatatcaacagagagcttggctgggcgcggtggctcacgcctgtaatcccagcactttgggaggccgacgtgggtgcatcacccgaggtcaggagttcgagaccagcctgaccaatatggtgaaaccccttctctactaaaaatacaaaaattagctgggcatggtggcatgcatctgtaatcccagctactcaggctgaggcagaagaatcgcttgaaaccaggaggtggaggttgcagtgagccgagattgcaccactgcactccagcctgggtgacagagcaagattccatcgcaaaaaaaaaaagctaacatgtgaccacgatgtgccagagctggtgctgtgtctggggaactgatgcttatgccccagcacctctgaaatgttgggtaaatggaggcagggccacccagcatgctcctgttgaaggctgggactcctcagcccttcctcacctctgctgattgacagcacgccccacacccccaggttttttgtagccagtgctatctggtcaaagggtcagtgggcctcttatggccagggcttcctcccggggtgatgggtctgctctgtgccagaaacagaggacacagcgcctccacagcactgcttccccactcatcctaccctaaggagcgcctcatctgccatcattcattcattggttcattccaccagtaattcttaagtgcctactcttactaggcactgcctcagctctgggattacagaagtgaacaaggcaagatttctccctcccccagctatggaatttatattccggtgaacaggaataaatgatggatagatggataccaaaatttcagagagtatcaggggctctcagtggactaaggcaaaggctggagcagagggttctctttatttagatcgggtggtcagggaaggcaacatttgagcagagacctgaacaaaggggacccagctttacaaagatctggggaaggggaacagtggggcacatgccctgaggtgggagtgagtgtgtctcactggagaacagcaagaccagaacagcaggcattgaggcagagatgggaggaagtaggatcagaaaggctggcaggagccagatcacataggaccttgggggccatggtgaggacttggggtattttatttgatgtagtggaagccattagaggatttgaagcagggagtgacatgattacataaagattttgaagggggactgacttaggcccagcctgggaaatacagaaataaagcataaaaccatgagatgttccctctgtcacagggtttcgatacaaacaggagaggtggggacctaagaagggaaaacttctgcagaggtggagttacagactaggaatttacagtgggggcttccaggaggaggtaacactgaagcccgcccggcctttttttttttttttttttttttttttttttttttttgagacagagtcatctcactctgtgacccaggctggagtgcagtagtgtgatcacagctcactgaaccttccgcctcccgggttcaagtgatccttccacctcaactttccaagtaggcagggctacaggcgtgcgccaccaagcctggctaatttttgtatttctagtagagacggtggtcttgccatgttggccaggctggtcttgaactcctgacctcaggtgatccgcctgccttagcctcccaaagtgctaggattacaggcatgagccaccgcgtccaatctgaagctgggctttaaaggatgggcaggattatcaattgtgtgaccctgggtgatttgccaatctctgccaccttcagttccttcatctgccaaatgggcatgatagtagaactaccttactattattattatgactgggaagtagccaggaatggcaaaaagaaaagtggagaaattcggaacaattatggcaatatcacacactaataataacagctaacacttttaaaggccctattgcttcaggcaataaatttttactataacgctagaaggtaaattctgttacgagccccatttcatagaggagaagtctcggtgtgaagattaaagtaaactgtacagggttatgcacctaggaagaagcagggctgagactcaaacccaggcagcacactgtatactttggagcctctatgtgatagaaggtagtaaaatatctcagcagttaagagattgagctctgatgacaaaactaattcaagcctttgtcctgccattttctaaccatgtgacctcttggccaagtgacttctgagcctctgttagctagtcaagaaaaatgggttgtggctgggtgcagtggtttactcttgtagtcccagcaatttgggagtccaaggctggaggattgtttaagcccagaagtttgaagctacagcaagccataatcacaccactgcactccagtctgagtgacagaaaaagaccctgtctctttatttatttatttatttcattgagatggagtctcgctctgtcatccaggttgaagtgcagtggcacgatctcggctcactgcaacctctgcctcctgggttcaagtgatcctctcaccaaagcctctcaaatagctgggactccaggcacccgccaccacacccagctaatttttgtatttttagtagagacagggtttcactatgttggccaggctggtctcggtctcctgacctcaagtgatccacctaccttggcctcccaaagtgctgggattacaggcatgagccactgctcctggccaaccctgtctctttaaaaaaataaaaaagggctcggggtgggggtcattcatgagtcaattcctatagagagcttagcacagtacaaacactagccatgatcctcatggctgttagtgacaacccgggtagaaagtaagctagaaccatccagtatgtttagggaatacttcagtcagattttgtcacgatcatgctgtgtaataagctacccccaaaactcggcatcttaaaacagccattgtgtattactgctcctgcatttgcggaccagctggagggtaaactgatggaggctgggctcagctggagaggctttgctccaagtagctctcatcttcttggacaagcaggctagctgaggcatgttgtcatggtgatgacacaagtgcaagagggccagcagacatgcaaggcctgggcttggaattggcaccctgtcattcttagccaaagcaagtcatacggctgagccagagtcagggtgcactctgcctttgtttttgtttttgtttttgttttctcggagacagagtctcgctctgtcacccaggctggagttcaatggcgcaatctcagctcactgccacctccacctcccaggttcaagtgattctcatgcctcagccttccaagtagctgggattacaggtgagcaccatgatgctcggctaatttttgtatttttagtagagatgaggtttcaccatgttggccaggctggtctcgaactcctgacctcaagtgatccgcctgccttagcctcccaaagtgctgggattacaggtgtgagccaccgtgcctggccatactctgcctctttagcagaaagaatggcaaagtctcatggcagagtgtggacacaggaaggggtagaattgggaccctgactgcagtgtgccacgggggtgatagacacgagggggaagccacgttcctcccttctgccccaggtttgcacttcctgcttccagggtagctgggaactcaaggcctggaggactaaggccttggctgttgtttcttttttttgagacgaggtctcactctattgcccaggctggagtgcaatggcaagaccatggctcactgcagcctcaacctcccagcctcaagtgatcctcccaacttagcctcccaagtggctgggactgtaggcatgcaccaccacacccaggtatttttaaaaagtttttgtagagatgaggtcttgccatgttgcacaggctggtctcgaactcctgggctcaagtgacccgcttcagccttggctgttggttcttgaccattcatggagctccccaaagcccaggacagaatcaggagggcagaggacacaggaggagctccctactccctcatgggagcctgggacagggattagacctgggcggaggggctcatggatgttccaggccaggaaaggacctgccacagagcggggcagcctgaggcagtgagaggaaagacgtgtttctagctgaggcagcgggccagaacacttgggtctgcggcgtggcaggtctggggtgacccacctttcttcccaccccacagtcctgatcctggaggccatcgagaaccacaacctcgcagacacggtgctcaagatcacggacttcggcctcgcccgcgagtggcacaagaccaccaagatgagcgctgcggggacctacgcctggatggcgccggaggttatccgtctctccctcttctccaaaagcagtgatgtctggaggtgctgaaaggcgcggccgggatggcctctggggagtaagggagggaggaaggggtgagggcagagtgggagggagggtctcctgctgaagccaggatctcagtctgacaaagggacctgctggcaaggtcaggccaccagacaagtgccagttacctgttcagctagcacaaatggcaactagggggcacactggattagaataaaaagctcataggatctagagacaaggccgggcgcgggggcgcacacctgtaatcccagcactttgggaggccgaggtgggcggatcacttgaggtcaggagtttgagaccagcctgaccaacatggtgaaaccccatctctactaaaaatactaaaattacctgggcgtggtggcagatgcctgttgtcccagctactcgggagactgaggcaggagaatcacttgaggccgggaggcagagattgcagtgggctgggattggccactgcactccagcctgggtgacagagcgagactctgtctccaaaaaaagaaaaaatttaaaaaagcatagagacagcacatggatgctagcactgaaagccccctcagacactagcccatgcactgtcccatctgtcagacaggaaaatgattaattcactcattcattccttcatctaactgcaccgggttctagggatatagcagagaagaaaaatacatgcaatccctgccctcaggaatagtaagtcagtcaacatacaagaagctcttttttataaagctgttttttaagaaaattataatttttaaagacaagtacaccagaaaaaagtgttagtacaaagtgcgaggaggctgagaggaaggcactttaagggctggaagactacttttgggaacgcttctctgagcaatctgagaaatgatacttcatctgagttccaagtggcaaaaaggaaccagtcacgaaaagtttggaggaagaaggaggtgctgaggtgagcatggtgtgtcccagaaacagcaaagaggcccatgtggctgccactgtgcaggcaaggaagagagaggtaggaaattatgtaggagagggagctggaaggccctgtgggtgagggagtggccttcaggttttattctaatgaagtaggaagccatgaggagccatgtctgaatagagtggtagctcacacctataatcccagtactttgggaggccaaggtgggaggatcacttgaggccaggaatttgagaccagcctggtcaatgtagtgagaccccatgtatatgaaaaagaaatttttaaattaatttttataaaaggaagtaaataaaaactcctttggaggccgggtgcggtggctcacgcctgtaatcccagcactttgggaggcccaggtgggtgaatcccttgacaccaggagtttgagaccagcctggccaacatggtgaaatcccacctctactaaaaatacaaaaattcggccaggcgcggtggctcacgcctgtaatcctggcactttgggaggccgaggtgggtggttcacttgaggccaggagttcattcaggactagcctggccaacatggtgaaaccccatctctactaaaaatacaaaaattagccaggcatggtggtgggtgcctgtagtcctagctactcaggaggctgaggcaggggaattgcttgactgcaggaggcagaggttgagatggcgccgttgcactccagcctgggtgacagagcaagactccatctgaaaaaaaatacttaaaaataaaagctcctttgactgttaggtagagacagccaatgatgggtctgttgctgtcaccagtgagagttgatggtggccatggagactttcaacccaggaccttctgcttggttggagccaaacctgggtctccccatttactgttcccgtcaattcccagctgaggctccagattgtccaagcagcaaattaatgggtatgggactgagacagatcagacaggaagtctccagctcagcctagagcagagcagccctttgggagaatttccaactggctgtacatcaggcgttcatttgtgctaccttttttttttttttttttttttttgggacagagtctcactctgccgcccaggctggagtgcaatggcacaatctcagctcactgcaccctcctcctcccagattcaagtgattcttgtgcctcagcctcccgagtagctgagattataggcatgcactggctaatttttatatttttagtggagacagggtttcaccatgttggctaggctggtcttgaagtcctgacctcaggtgatccgcccgcctcagcctcctagagtgctgggattacaggcatgagtcactgcacccggccgggcaggctaattctttctgatgtggtcctgtcctgtacttagcaggatgcaggatatccacacctccccgccataaacttcagtaacattctcagtcattattacaatcacagtaaccccataggtttccaaggacatgggagagaggggtggatcatgctaccctccagttataaaccactgtttctcccccaccttgtatggtctccattctgaagtttacttcatgatccaaaatgactgcttgagctccagcgttttttgttttttttttttttttgagctggagtcttgctctgtcgcccaggccggagtacagcggcgcgatcttggctcactgaaacctctgcctcctgggttcaagcaattatcctgcctcagcctcccaagtagctgggactacaggcacatgccaccaggcccagctaatttttgtattatttatttattttttttaatttttcagtagagacggggtttcaccatattggccaggacagccttgatctcttgacctcatgatctgcccacctgggcctcctaaagtgctgggattacaggcgtcagccaccgcacccagccttttttttttttttttttttaacagggtcttgctctgtcacccaggctggagtgcagtgatgccgtcacaaatcattgcagcctcaacctcctgggctcaagtgatcctcccacctcagcctctctagtagctgggactacaggcatgccaccacaccaggctaattttttgtagagacgaggtctcactttgtttcctacgctggtctcgatctcttgggctcaagaggtcctcttgtcttggcctcccaaagtgctgacattacaggcgtgagccactgtgcctagctccacacgccagctttttttttttttttttttttaattttaagttctgggatacatgtgcagaacgtgcagggtttgttacataggtatacatgtgccatggtagtttgctgcacccatcaacccatcatctaggtttgaagccccgcgtgtgtcaggtatttgcctaatgctctccctccccttgtcccccaccccccaggctccaggttttatgtctacattccaaccacaagaaggggaaaaaaggaaaatggcaccccttctttttattttttgagacgtagtctcactctgtcttccaggctggagttcagtggcacgatctcagctcactgcaagctccgcctcctgggttcacgccattctcctgcctcagcctcccgagtagctgggactacaggcgcccgccaccacgcctgactaattttttgtatttttagtagagacggggtttcaccgtgctagccaggatggtctcaatctcctgaccttgtgatccgcccgcctcggcctcccaaagtgctgggattacaggcgtgagccaccgcgcccggcctcattttcttacccatgttgtttttgttcctgcgctcctgtgcctgtctgctgtgctgagctgcagatgtgtcctgccgcggcttcgcaggacagggataagttgagacaggaagcaagaagccttgcctgtcaggctgcccttggcatgactagagtgtatgtggggattttcacctcttattttggggtccattctgttccttctttgaacaatagtctttacaggatagggtgtttggggacagatttcatcttatttaagatataaataatataaaattaacccactataaatttatttttcatttaaaaaaatttttaaaagacaggctctcactctcccacgcaggctagaatgtggtggtatagtcatagctcactgcagccttgaactcttgggctcaagccatcatcccacctcacactctttcccggccgggcaccccttctttttgaggatacttcctggaagctagttgcctactacaccccctcctacatcccatgtaccagaactgtggtcatgtggcatgcttagctgcaaaggagaatggaaaattcatgcaggcagcatgtggccagctcaattcaccagcactgtcactgaagaatgggaggctgtcagctgcatatgggggcagtgattgtgtctatctcttcccaatgtctaaaatggtgcttggcacacagtaggcacttaataagtatacgttgaatgggccgggcgcagtggctcatgcctgtaatcccagcactttgggaggctgaggcaggcggaacctgaggtcaggagttggagaccagcctggccaacatggtgaaaccccatctctactaaaaatacacaaattagctgggatggtggtgcacatctgtaatcccagctacttgggaggctgaggcacaagaatcacttgaacccaagaggcggaggttgcagggagccgagatcatgccactgcactccagcctgggtgacagagactttgtctcaaaaaaaaaaaaggatatgttgaatgaatgcatgagtggatagtggggagaccagggatctactccaggataaacaccacacagaatggccatcaggatctgggaggatgtagagtttgcagaggaagatagccttgcagggaccacagcacagtgacgcacgctctggtaccatggagccactgagagcactgtcgtgggcagcaggcagacctgagtccaagtgtggctccaccactcactagctgtgtgaccttgggcaagccccttacctctctgagcgtgtacctgctcatcagctaaagcaggggtcataccaaatccttctgccttacagggctgttgtgaggattaccgagtgcctagcacagtgcctggcctgcagtaagtgctttataaatgttaaataatgttaactggtttttagaggtaagtgctgagtgttttggggaaacgtagaggaggggcctctaacctagctttggaggctgtggaatcaaggaaggcttcctgacagagggggcaacctgtgttgagacttgagggacaaatagttacacaagggaagagtgttctccacaaagggaacagcatgtgtgaaggccagaggttagaaagcacagggcctgctcagtattcagtgtggctgcaagatgaagttggggttagaatgggctgagagtgtttggaagtgaggctgcaggggtcatcaaaggccagggccaagaaggatggatttaggtgggatgcagtggctcatgcctgtaatcccagcactttgggaagcccaggcaggaggatcacttgagcccaggagtttgagaccagcctgggcaacatagtgagacctccatctctacaaaaataaaaataagaaagatggatttggccagtaggaacacgggacctgaagattttcaggcaggggagagggaagacaggccgagcaaaggagagacatcagagagccaaacccaccccatctattggagaacaaggccatggaggtcaaagcaagttcttgtgacctcattggccgggggtggctgttggggtgagggcagccctgcatgggaccaagggcagggctgggtataggtgaggattggggtgggctgcgacatcacccctccctctcccctgcctgcagcttcggggtgctgctgtgggagctgctgacgggggaggtcccctaccgtgagatcgacgccttggccgtggcgtatggcgtggctatgaataagctgacgctgcccattccctccacgtgccccgagccctttgcccgcctcctggagggtgagccggggccccgtgacgagggtaggctcagcttggagtggcagggacctgtgggcccagacctttccccttcacacctatccataccagtgggcccaggagtgaggaagaaggggctggaacccactggactctaaacagcctccccatggttggctccatcccccacatcccagcccttgtttgggccaggcccagagctctcaggacaacctgttaggattccttggccctgggattccaccttgatcctgattccactaccagcccctcctcggggtgcaggtcccagggtttctctcccagcgtttcactgagtggaattggccaggagcttggctttgaatcccttcccctcagctccatagcagctgtttgtctgccatccccagaaattctgccttcctctgagcaggctgagtccccagagcatgaccactgacacctccatgccccaccactgtccttcctcctcccaccccagaatgctgggacccagacccccacgggcggccagatttcggtagcatcttgaagcggcttgaagtcatcgaacagtcagccctgttccagatgccactggagtccttccactcgctgcaggaagactggaagctggagattcagcacatgtttgatgaccttcggaccaaggagaaggtgaaggcagggggcaaggtgggaaagatggagcaagacccctgagttctgatgccttgggctgctcagagactcctcccctgaaccccagcctttgggtccatgcagggtcaagggagccttttttgcatattaagaaaagacagcctcctgttggtggattaataagaaaaaggcaccctgtactgaagtacttacaggtgacactgcatgatgtctggggttggctttaaaatactacagcagaaacgaagagagggcaagaggagagaaggacggggatacaagattcgcaaagcataggtaattgttgaaattggatgatgggtacaggggggtgcactgttctctgcttttgtggatgtttgaagttttctaaattgaagagttaagaaagaaaaagaaagaaaaagcacccctttctttgagctaacacagttccctgccctggcacccagcttggctagcaaagcatgagtcgggtggtgaaaccagtgtaccccacagcaaggtacccttgtgtgaggcaccaaccagacgcagcagccctgggtccctccccaggaagcagagcagctaagcccctccccccagccaccgcctctccttcccaggagcttcggagccgtgaggaggagctgctgcgggcggcacaggagcagcgcttccaggaggagcagctgcggcggcgggagcaggagctggcagaacgtgagatggacatcgtggaacgggagctgcacctgctcatgtgccagctgagccaggagaagccccgggtccgcaagcgcaagggcaacttcaagcgcagccgcctgctcaagctgcgggaaggcggcagccacatcagcctgccctctggtacccacccgtgtccccagagcgccccccaagaggctgctgggagcagccccgacctaggatttatctcttccttttctttttcaacttgtttttattgctaaatatatcgcacatagtcagtgatcagcccagtgcagtggcgagcacttgtagtcccagcctactcaggaggccaaggtgggaggatcacttgaggccagaagtttgagaccagcctgggcaacatagaccccatatttaccaaaaaaaaaaaaaattttttttaattagctggccacgttggcatgcacttatagtccaagctagtggggaggctgaggtgggaggatcacttgagtccaggagttcgaggctgcagtgagctgtaattgcaccactgcactccagtctgggcagcagagcaagaccctatctctaaagggaagaagaagaaaaaaagaaaatgaccaaaaacctgtacagccaaatgagttactctagtcacccccatgaaagcagagagaacctcacagccatcccaagtgctttctacctgcccctccagacaacctcacaccatcccctgagaggaacatctgtcttgacacttaggacagtcacttctgaactttctttttcatgttatctctctttaaaaatatcttttaatctggccaggtgcagtggctcacgcctgtaatcccagcattttgggaggccaaagtgcgtagatcacttgaggctaggagttctagagcagcctggctctagaacatggtgaaatcccgcctctactaaaactacaaaattagctgggtgtggtggtgcacacgcctgtaatctcagttacttgggaggctgaggcacaagcatcgcttgaacccggaaagcagaggttgcagtgagccgagattgtgccactgcactccagcctgggtgacagagtgagactctgtcacaaaatatataattaagatatacatatatatgctgatatttgaccatttttttacctacaaaaacagaagtttcacatggatcaacctaatagttggatctcaagacttaatcagattcagattcaggtttgattttttttttccccacactgcttcccaggtaatgcattcaggagggaggcacgtagtgtctacttgtctctttctgtgatgttacaagccagaaagcagtgccttaagcagcagtggccagtggaaatataatacaagccacgtgtataattttaaattttctagtaagctacacataaaagcaaaaagaaataagagatgtcaattttaatattttttattaggccaggtggggtggctcacgtctgtaatcccagcactttttggggctaagacgggcagatcacctgaggtcaggagtttgagaccagcctgaccaacatggagaaaccccatctctactaaaactacaaaattagccgggcgtggtggcgcatgcctgtaatcccagctactcaggaggctgaggcaggagaatcgcttgaacctgggaggcagaggttgcagtgagccgagatcgcgccattgtactccagcctgggcgacaagagcaaaactccatctcaaaaaatatatatattttttaatttagcccaatatatccatgcaatcaatacaaaataattgtgagatattttaccttcttttttcacactaaatctttgaaatccagatgtattttatatttatggcacatctaaatttggacagtaaattttcattaaaaatttttttttttctgagatggggtcttgctatattgcccagggtggtcttgaactcctgcgctcaggcagcgctcccactttggcctcccaaagtgctgggattacaggtgtgagctactgtacctgacccatcaaaaatattggatctgtatttagatttcataaaagttagagttgaaaaagtacatatacatacccaagttgctccaaacatgcttaaatgtttccaataaccaaatggagtacctgttttttgttgtttgtttttttgtttttgtttttgttttttttgagatggagcctcgctctgtcacccaggctggagtgcagtggcatgatctcggctcactgcaagctctgcctcccaggttcatgccattctcctgcctcagcctcctgaatagctgggactacaggcacccgccaccacgcctggctctttctttcttttttttttttttttttttttttgtatttttagtagagacagggtttcaccgtgttagccaggatggtctcaatctcctgacctcgtgatccgcctgcctcggcctcccaaagtgctgggattacagacatgagccaccgcgcccagcccccatacctgtttttaaaatttaaactcaaattgcggtaattacaataaaataaagagttggctgggcatggtggctcacacctgtaatcccagcactttgggaggcggatgctggaggattgctcgaggccaagagttcaagaccagcctggtcaccacagtgagaactcatcctttatatatatatatatatacagtttaaaaattagataaataaaggttaaactccaattcccccattgcacaagccacatttcaaggtgctcagctgctacacgtagctactggcggccatattggacactgaggcctaggtccttgatccacaagagctcttgtgcttgtacttattaaaccacagtccattgctgagcctcaccccaacttgctgattcagggagggcccaagaatttgcattgccaagaaattttcagctgatggtgatgctgctgttctggggcccacactctgagaaccactgcattaaggaatgaaaaatggcggtgttcccattctagaattccttctctacttctacagaagaaaattccctttggtaatccctggaaccatttgcttaggaaagcttctctttctttctgcaggctttgagcataagatcacagtccaggcctctccaactctggataagcggaaaggatccgatggggccagcccccctgcaagccccagcatcatcccccggctgagggccattcgccgtgagtatctcccaaggccctgaccagtcagtcagtcagtgaacaaacattttttagcacgatgtttatacctggcaccaagccagagtaacagcaagaaagaagacagacaaggcccttttcctcattcttatcacaggaaacagatagtaaacaaataagtcagtaagcaggataatttcttttttttttttttctttttttttggagacagacagagtctcgctctatctcccaggctggagtgcagtggtgcaatcttagctcactgcaacctccgcctcctgggttccagcgattctcctgcctcagcctcccgagtagctgtggttacagtcacacatgaccacgcctgcctaattttttgtatttttaatagagatgggggtttcaccatgttggccaggctggtatcgaactcctgacctcaagtgatccacccacctcagcctcacaaagtgctgggattacagcatgagccaccgcgcccgggcgcaggataatttctagtagtgataagttctttaaaggagctcagggaagggaataaaagaggagatgtattaatcggagttcttcagagaaacagaatcaacagcatatgtttagatatatagaaagagatgtattggctgggcacgatgactcatacctgtaatcccagcactttgggaggatgaagtgggaggattgcttgagcctaggagttcgacaccagcctgggcaacaaagcgagaccccatctctacttaaaaacaaaaacaaaggccaggcgcggtggctcacgcctgtaattccagcactttgggaggccgaggcaggcggatcacgaggtcaggagatcgagaccatcctggctaatacggtgaaaccccgtctctactaaaaatacaaaaagtcagccaggtgctgtgacaggcacctgtagtcccagctactcgggaggctgaggcaggaaaatggcatgagcccgggaggcggagcatgcagtgagccgagatagcgtcactgcactccggcctgggcgaaagagcgagactccgtctcaaaaaaaacaaaaacaaaaacaaaagaaatagatgtattatgagggattggcacatacgattatggaggctgggaagtcctgcaatctgccttctgcaagccagaggtgcgggaaagccggtgatgtagttccaaatcaagtccaaagacctggcccagcacggcggctcacgcctgtaatcccaacactttgggagaccgaggcaggtggatcacctgaggtcaagagttcaagaccagcctggccaacatggtgaaacccagtctctactaaaaatgcaaaaattagctaggcgtggtggcgcatgcctgtaatcccagctactcgggagactgaggcaggagaatcacttgaacctgagaggcggaggttgcagtgagccgagatcgtgccactgcactccagcctgggcgacagagtgagactcagtctcaaaaaaaaaaaaaattgtccaaagacctgagaacctgaacaccaatgtccagtgtctcagggcaggagaagatggatatccacgctcatgcagagagcaaactcacccttcctctgccttcctagacaaaaagagctaactctctttttgttctgtctgggccctcagtggattggatggtgcccacccacattggcgaggatgatctctctttactcagtccactgattgaaatgctaatcatccagcaacaccctcacagaaatcatgtttaaccagctacctaggcgtcctttggcccagtcaagttgacgcataaaattacccatcacagaagggttgcgattttccatctggaagccctatgggaggaggtgaggtttgagcagggaccttcctgctgagtgagacaggctgagacctcagggaagcatgcccctggcggagggagcagcaaaggcaaaagctggaggtgagaacagcatgggctgcttgttaacctgtttggctggagcagagtgaatgggaggaggacataggttttgtgatcagggagttctcaggggtcagatcaggcagggccctgagagcaggataagagtctggattttcctttcttttttttttttttttttaattttcatttgacacctttggtatggatttttttgtttttaatttttgtttttagttctggggtacgtgtgcaggatgtgcaggtttgttacataggtaaacgtgtgccatggtgatttgctgcacctgtcaacccatcacctaggtagtaagcccatgcattagctatttttcctaatattctccctcccccaccctaccccccaacaggccccagtgtccgttgttcccctccctgtgtccatgtgatctatttgctcagctctcacttataagtgagaacatgcagtgtttggctttctgttcctgcattattttgctgaggataatggcttccagctccatccatgtccctgcaaaggacatgatctcgttcctttttatggctgcatagtattccatggtgagacagacgctcgctctgtctcccaggctggagtgcaatggtgcgatctcaactcactgcaacctctgcctcccaggttcaagcgattctcctgcctcagcctcccaagtagctgggactacaggcctgcaccaccatgcctggctaatttttgtatttttagtagagatggggttttcaccatgttggccaggctggtctccaactcctgacctcaagtgattcttctgcctgggcctcccaaagtgctgggattccaggcaagagccaccgcacctggcctggtatggattttcttttaactgccctggggcagcccccagagccatgcgagcaaggcactgagggaatcaaattgacctttttccctctggctgctgtaagaaataaaggtggagaaagcagtgagatgatggaggccaggccagggtgggggacttggaagggacagatgtccacagtcggggctatatggcagagacacggtcatcggagtttcctggtgggttgaagggtgaaaggctagctcccaagttccaacacctcattcaccccagcactgtccccacccacagcccccctgccctctgtctgggcacctgctttgtaccaggcccaggaggtcagtcctgcaggggacacagagacaaatacccataccatggcagcaaacactggcaccagataggtccagagcattgcaggtacagagatgaaggcagctgacccccagggaactaactacccagagctggagaccagaagcgcaggcagcccgccagaatgaatggtgaagggttaggctgtgaagaggaggggaggctggaggagttggcagggaaccgctcatggccttcagtgccaggcggaggagctggaaccttgtcctgacagcagtagggggctatggggagatatatagcagggagggtcatgactggagttcaaaagagcccttggactcccaggcggagggtgggcctgagctgggggcactggaggctgggagcccagtggggacagatcctccacccagtaaccaagtggcttctctggacccagtgactcccgtggactgtggtggcagcagcagtggcagcagcagtggaggaagtgggacatggagccgcggtgggcccccaaagaaggaagaactggtcgggggcaagaagaagggacgaacgtgggggcccagctccaccctgcagaaggagcgggtgggaggagaggagaggtgaggtgtggtgtggtcatgcccaccctgtgcccaagccccagctcccaggctccaggccacaggactgaggtctccatctctccctggaccccgcaggctgaaggggctgggggaaggaagcaaacagtggtcatcaagtgcccccaacctgggcaagtcccccaaacacacacccatcgcccctggctttgccagcctcaatgagatgggtaagagcctgggttcttgtaagggggtgggggttccctggccaaaggggtgagcctcctggggctgagcgaagagaccaggtttcactgggccagtgagtggaaggccttcctgggaagggagatggtggcccctggggcgtggggggtcatttccaggggcagggaccacccttctctgaggcttctcctggagacagattcaagaacgatgctcgtgggtcttggtcttgctgttggaggggtcatcgggggctgtcccttggcacaagtccccgtggggccctggccagccctgcagcggagtgatggccctctccggttgcagaggagttcgcggaggcagaggatggaggcagcagcgtgcccccttccccctactcgaccccgtcctacctctcagtgccactgcctgccgagccctccccgggggcgcgggcgccgtgggagccgacgccgtccgcgccccccgctcggtggggacacggcgcccggcggcgctgcgacctggcgctgctaggctgcgccacgctgctgggggctgtgggcctgggcgccgacgtggccgaggcgcgcgcggccgacggtgaggagcagcggcgctggctcgacggcctcttctttccccgcgccggccgcttcccgcggggcctcagcccacccgcgcgtccccacggccgccgcgaagacgtgggccccggcctgggcctggcgccctcggccaccctcgtgtcgctgtcgtccgtgtccgactgcaactccacgcgttcactgctgcgctctgacagtgacgaggccgcaccggccgcgccctccccaccaccctccccgcccgcgcccacacccacgccctcgcccagcaccaaccccctggtggacctggagctggagagcttcaagaaggacccccgccagtcgctcacgcccacccacgtcacggctgcatgcgctgtgagccgcgggcaccggcggacgccatcggacggggcgctggggcagcgggggccgcccgagcccgcgggccatggccctggtgagtgaggcgccctgcacccaggtcacagaaaaccccttctttcctcctctgccagggtcgcaagtccagcccagccacgacccctcaggcagccacctcctgcttcttgtggaggagggagggtctgtgtccctttaccgctcactcctggaggcatcgggggtctccaggggactgagacacaggcggcaaactgatgcctataaggccaggcaggtgcctatagcggttgtgaccagcatgaccatcgccaattcttacacagcctagacactgttctcctccatctgttaactgggtgggagatgcggccatagcagtgttattaagtacccacgtcaggcactgtgctgcttgttttaagttatggttattctatttgctcctcacctgcgtggtgaggcaccatttttatcccccttcagagctaagccatgcctgagcttagcccagtgcaggagagtcgggaagaccagggctttggcccccgaggctgccgctaagcagcagttccagaaggttgaggaacatgccagggtccacccagaggagcaagcagctgggagtggtcccagtctaggtcaaggtcccagcactgccacactacagatggaaactggatgcagcaagatccacggatttctcgagagaaaccagaacttgtgcttttcatgtaacagctctgggctttttaatgccaccctctgccccaccccactcacctcctctgaacctctcttaccaggccctcgtgaccttctggacttcccccgcctgcccgacccccaggccctgttcccagcccgccgccggccccctgagttcccaggccgccccaccaccctgacctttgccccgagacctcggccggctgccagtcgcccccgcttggacccctggaaactggtctccttcggccggacactcaccatctcgcctcccagcaggccagacactccggagagccctgggccccccagcgtgcagcccacactgctggacatggacatggaggggcagaaccaagacagcacagtgcccctgtgcggggcccacggctcccactaaggcctgcccaccaccgcccgcctgggcagccatgaatgtagcgccccaggccctgccccagcccgccatgccacaaggtgggggaggccctgggcaggatgttcactctatttattggggaaggagggaggggggggacacttaacttattcctttgtaccccagggggtggagccctgtgcccaccctgcactggggggagggtgggcagggatactcagggacagggcatcatgggggatttggcacaaaatggagcattaaaggtaacccctgccccctaccgcacttgattgtgttcctttttccttttttttttttttttttttttggagacagagtcttgctctgttgcccaggctggagtgcagtggcaccatctcagctcactgcaacctccgcctcctgggttcaagtgattcttctgcctcagcctcatgagtagctgggactacaggctcccgccaccacacccagataatttttgtatttttggtagagacagggtttcaccatgtcgaccaggctgctctcaaactcctgacctcaagtgatccacccatctcggcctcccaaaatgctgggattacaggcgtgagccactgcgcctggcctagactgtttctttccctggcccaggccctgatgctgggtcatcccagtggaacattccccccgaccccacacaccctccctgggcttctctgggtttctaaggtccaagggatgaggccctccctggtccccccaagaacaccacacaagttatgatcaccagtgacaagtgttttaccaacaaacacatgagtcgggggaagttacatggtgaggtgggagggcgagggatagagaggtccccctggattggcctcagccaattacatcccgagtctgggacccagccccactgtcttcccgctggaggctgcaacgattcatcttcagctgagtcagctggatgtagcggagcacattggtgtctgcaggggaggtgggcagggcatcatctgggtgtcccggggcagcaggtgacttccacacctccctggctcacaccccattctccgaagtatccagcagctcgctcacacagccagtagagccagagcccttccccaaagccccagtcacagtcggcagtccccagtcacagcggagccatcgcacacctctgtgcgcctgtatttgcggcaccctctgccaggaatgcctcttcgcagaggctcccgtcacacttctcatcctccagcgacatctgcaagaagtctgttctctccgagccacttaacaggaaaactaatctcgtctcggctcccacaaccctgcacctgttgtaatccctcttccttcttcattggctcttaatacaaaactgagtgttgtgtctgccctcctgcactcatgtgtgtaagtgcacacatgcacgcacacacacacacaccccaatttcctggcatcgtccacccgagtggatgagtggatggtgcaggaagtgaatgaataggtgtgcgtgaatgggtgagtggaggaatgagtgtgtgcggtaggcaggggtgggacggggtaatggagatgacagtgggtggatagggaagtgactgagcaggtgaataggagatatcagatgtggcaatgacggtagatgagaaatggccggggagatgtcagaggagcgataggtggacggatgtttgaatggcgggtgaagggcggggtggatgaatggatgagtgggcgtgtagggagtaggtgggtggcgcagccctacctagaagcagctccgcgggaggagggctctgctattctgccctgatcttcctgcctgttccctccgctgcagcccctttccccgccctgggcccagccctcacctctgccccgccccgccactcacctgtgggttcccggctgcgggcctcctgcaggtagcgcagcgcgcgtgcgtagtcgcccaggtggtagaaggcaatgccggcacggtaggtggccttgaagttgccctgctgcttctccagtaccttgagacagtactcgcgcacgcgctcgtagtttaccagctccgactgcagcaggcaagctgcgagggccccgcggccggcactctcagagcctgctggcacccccagaacccacctgactgcgaggagccgaggctccaggcggcagggaaccaggcctaagggattgctccggcaaccaggggcgccaatccgctcgcctatcgaaacaggcgcaactgcgccgctgctagggggcgccaaaacacggacaggcgccactgggcgatccacccagagctgtcggtgggcaagagcactaaggccccgcgcgggggcgagggccgggacctcgagagcctggctcagggcagacttcctcaccttgggtccacgtgcggccagggggtggaaagaatgactcaggggaagcgaggccctgaatacccgacccaaagaccatttcctgcatcccagctccctccagccacagacccctgtcatcccctacccctaatccctttccttgatcaagctctgaaggctcccccagaagcccacagccctggacccttcagccccagggcccctggcccccaagtcgccaagctctcccgattgccccctcccctcgtgccccatccccccaccccccgacggcgtacccgtgagggagtcgtaacactccacctccgtgctctccaccaggcgccgctgctcctcgctgaggcgcgccggcccggggctgctggtgggcccgggggcgggggcgggcaggccgctagggcgggccccctgcgccgccttcagctgcagcagcgctcggtggtacttgccgatggcctcccggaacttcttctctcgatagcagcgctggccctctgccttgaacgccacggcggcacgcaggctgctgtcgagcgccgcgcccaggctccccgacggctctggggtaggaccgggacgagccgagccatggcgggagcccgagcctgggcccgagcccggtggggagagggcgggaggcgggcgcggcggaggctccggggcagcgctgagcatcagcaccggggacagcgcgccgcgctgcattgtgggaaactcctgccgccgccgctgcagctaccgcatcgccccccgcggggctggtccccaccctttctccgccccctcacctccggcagccgactccggctgccccctatgggtctagggaaacccctcgagacttcccccatgctcactctcaaattaaccaagtcctagttctccagcccgccccccgaattgttcccattccccttaccctccccaacctcctgcctgctctcctccccggtgcccaaagctcccgaagatttctagaaggaaaggacgagcctgggggaaagagcaggaagacatcagcctcacggaaagctggctctcagcccactggccatttggcatatcgaatgagaacacaggatttggacccaagcttcccaaattcaaatccctgcttactttctcactagtggtatgacttagacagctcgcttaaactacctggaactctgtatcctcatcagtaacatggcacaataatatcacctttagggccagtcgaggtggctcacgcctgtaatcccagcactttgggaggtcgaggtggatggatcgcttgaggtcagaagtttgagaccagcctggccaatatggcaaaactccgtctctactaatatacaatatatacaaaatttttgtatatatacacaaaaattagcctggtgtggtggcgtgcacctgtagtcccagctactcgggagactgaggcaggagaatcacttgaacctgggaggcagaggttgcagtgagccgagattgtgccactgcactccagcctgggtgacagagggagatgccgtctcaaaaaaggaaaggaaaggaaaggaaaggaaaggaaaggaaaggaaaggaaaggaaaggaaaggaaaggaaaggggaaaggggaaagaggaaagagaaaaaaggaaaggaaaggaattaaaaataataccacctttgggattcatctgttaatttatgaaacaaatattcactgacatcctttctgtgcccagctctgtgctggatgatgctgggacatagcagacactgcgtgagcttcagaccctactctcactgggccccagttcagtgggaagacagaccagtgaccagacagtgacagccctgagcaggctagcctgggaagcacaggcagaggggtcggggccgaggtggaagaggcacaggcagaggggtcggggctgggatgtgggaggtacctgccctgggctgaggtggtgataaagtcttcctggaggagggaataactctaaaaacaagagagatctccttcttgccctcatccagctcggctgtctatgggggaaaacaagtgagagggcaaacaagtccccaggaaaggaagcatgcaggaggctttcaagaaaaaaatcgaggatgaatgagtcaactgcccttcagtcctcctttgccgcctccttagctgtgggacctgggccaagttcctcgatcctcctccttcggcttcgtctgtgcgacatgaggatagaaggcaagttaacctcagagcggttgcagagactgaattatcttatgcaggtaaggcacttagcacagggcttcatacattaatgggcaattaacaactggtgtttcttatcgtccattagactctgagtcatgtgatcatgagtgcctggctctgagtcagcatccatatatagttgttgaatgaatgagtgtgtgagtgaatggcattatgcattactactcctccccctcctctgagactctagcttgggtctcagccccaggcctccccactctccccaactccacccccacagcacatcctctagctggaggtcccatggcaggtcacatgtgacagacagaaaccagaactcagcaccttccatctcaaccagagcatctgcctctatctcttattgtactttgctgtaaaacgcttttgctgagtgagtttctcccttatccctggggtccagccttgaacacctcaggggtgcaaacattttcctctctgcatctccaaacccaggctcagttaggagtgtaaaactcatgaatttgagttcttgagcagtgcacacacctttccctacctccggtgtgtctgttttgtaatgaaaaacacagagatctggctgggcgcagtgactcacacctgtaatcccaggactttggaaggccggggcaagtggatcacctgaattcaggagttcgagaccagcctgggcaacatggcaaaaccttgtctctaccaaaaatacaaaaaattagccaggggtggtggcgtgcaccacttggaaggctgaggcgggaggattgcttgaacccaagaggtggaagttgcagtgagctgagatcacaccactgcactccaacctgaatgatgacagagtgagaccctgtctcaaaaaaaaaaataaaaaaaaaaggagatccgttgattcataaccatgttttctgacgaagtaaatgcctaggtacccaggcacagtagcacaggacaactgtacctaaaatcacagtcctgctgggatgcaatgctaacacttttacaacacctcctaggtgtcagacattgtcataaagagctttcccttttatttattttttattatttattttgagatggagtcttgcactgtcgccggggctggagtgcaatgacgtgacctcggctcacggcaacatccaccttccgggttcaagcgattttcttgcatcagcctcctgagtagctcggattatagaagcccgccaccacacccagctaatttgttgcatttttagtagagacggggtttcactatgttgaccaggccggtcccaaactcctgacctcgtgatccgcccgcctcggtctcccagagtgctgggattatagacttgagccatcgcacctggctgctttacgtatattttaactcacatcctcaccacagtgtcaggaggttggtaccataattatccccactgacacctgggcacttcccaggttaagtatatcagaccccattgataaaactcttactatccaggacttactactacaaactgatgaccttcgcagagcatcttccaggcttgggagaacctatcttcatagcccagtatatgtgatgtgttgggcttgtacaaccattaagaaatattgaattaggccgggtacggtggctcaagcctgtaatcccagcactttgggaggccgaggcgggaggatcacctgaggttaggagttcgagaccagcctggccaacatggtgaaacatgtctctactaaaaatacaaaaattagccgggcgtggtggcaggagcctgtaatcccagctatttgggaagctgaggcaagagaatcatttgaacccgggaggcggagtttgcagtgagccgagaccgcgccattgcactccagcagcctgggcaacaagaacgaaactccgtctaaaacaacaacaaaaacagaaagactgaattagttgacatctaaacgcagatatggaattgcagaatctcaggtttacttgaataagatctgaaaatccggcaacatcgaggtagcatttcttctgaccgggatgggcattctcaactcccccacagtccccatctcttgtgattttttgccagtccttaagggatcccagttttatcccgctgaatgactcttggggaagcccgccattgccccctggtggaggagttcagaatttgcattttatctcccagcaaccattaaaggaagtggtgagcacatccaatcagagggatgcgaggcctagaaagcgaccaatcaaaagcgagaggggaccggaattcgaccaatgagggcagagagcgctcagaataaaataaattcttttattgagatgagagacggacacacactgggagggttttgttttttgttgttgatttttttgtgactgagtcccagtactcagggaggctcagactggaggcggcggagcaggcaggcggcggcaaggctggtcccctggcgctggggccgcgcatacttgaggaagactgcggcgcgacccggcgcgggacctcggagcgcagcgcgggccatgcacggctcgagggtgcccagttcctcggggctgcagcagggagatggagaaactgaggcagggcaagtggttggagatgacccatccttggaactggagactggaggctgagaagaagcgtcgatgtggttccccacggacgggtcgggggctctcttgagatcgggcacgcgtcccgtcttcaactggagtgactaggcgagcaccggggagaggtggacaccctattcttcctacagggcgcggctagtgcggagtcagaacactcgaggaagcaaggaggggagctgaggatgggcagccatcctctctatgctgggtgcacaggctgagggaaaccatggttcgccctgccacctggtagcatggttagcggccctagcagctaaaggaacaccccatccaccaccagatacagagatggaggactcgaggcctgggtgatccttcgttctcagccctggaaggcaataggagcatcttctgggcctgggagactatcttccactctggggcaaggttaagagaccccagatctggactaatggggtcctcccaccccattctctcccacacccagaaaaatcaagtctaggtgccacctcctcctcaataattgtctctcattctccgagaccgtaaaaatgaccaggaaggtaagtccctgaagctgcggtgaccccatacacttcctccgccaagactacacctgtaaagttctggctggagcctggagcccgccccgtcgagcaagcggtgcgccaggctcagagccgcagccgcacgacgacccggctcccatcccgccgcctcggcctccagcaaagacagctccaggaagtaggtggcaagtaacatcacctgcaagtgaggcggggcgactgtcaggccacgccccacttcgcgccggccacgcccccaccccgcgtattcacaagggctcacctgggggctgctccctgccagcgcggccagcagcccgaggcacagcagcgggccggggtggtgcagccggaaatccaggcggctcaggatgcgacgctcggcgcgcagcagctccgcccgtgagaaggagtccgcgctcaggaggcagaggaaggcgggctgcagatgggggatgcggggggaggtgaaggagtcttggatccgggctctttactccctgccctggaaaggccccaagttccggacctcagtttcctggtgtgtaaaatggggccattgacttgtgtctggaagtcgtagagagcacgggcttgagggtcctgggttcaagacctaggttcgagttcaaaccccatcatctgctcactgtgtgacataggacattcacttaagctctctgcctcagctaccccccgccccccgtaaaacagatactactccctgcttcaccaggcagttctgataaggcactgaattcatgcatgttgacggtaactattcaagatggactagtttatattatttttatttacttttctaaattagagacgaggtcaccttggctccccaaagtgatttgttttgtttttttttgttgttgttgtttgtttttttggagtgcagtagcgcgatctcacctcacagcaacctccgcctcctgggttcaagcaattatcctacttcagcctcctgagtagctgggcctacaggcgtgcaccaccacacctggctaatttttatatttttagtagagacagggtttcaccatgttggtcaggctggtctcaaactcctgatctcaagtgatctgccggtttcagccttccaaggtgctgagattacaggcgtgagccaccacccccagccttaagacagactattctagactgagtccaagttccaactgcttgatttggggcaaatgtcttcctctctctgagcctcggtctcctcttctgtttaagggacacattgacagcccctccctcatacatgttgggaatcccagactcagcacggtgcttggcacacagtagtcactgaatcagttactccccaaaggactccatccaccctcccaaaccccaccccggaagtacctcgggaagcacgcactcttccattttgcacgccacaaacaggcaagccacgcccagcagctgcaggcgatgtagacgcacgcggccagcgctcaggtaggaatcaagcaggtgaaccgccagataaagtgtgtcaccagccagacccaggtactcctgaggaggggcaagggtgaccacggggtcctgggcggcgacgcaaactcagccccccacacccttccagatacctacgtgcacctggaccagccagtctaccaccagggcgcgcatctccggggtcacagcgcggggcagggctctcaggggcagcacgcggcacacctggggttggggcagggacgcttcactctccacacctgtgcctctgcctttctcctgagctccagccctggatgcagcagcctcctccagtcagttggacatcttaggcatgccacacccaaactggcctccaaatgagctcctcttacgtgtcctcacctagaactctgggcttcgttccagatgcctccatacccacctctccgccacgtggactcctgggcgtctccctctaggttcccagacttcactttttttttttttttttgagacaaagtcactctgttgcccaggctggagtgcaatggcgcaatcttggctcactgcaacatccgcctcctgggttcaagcgattctcccgcctcagcctccctagtagctgggattacaggcatgtggcaccatgcccggctaatttttatatttttgtagagacggggtttcaccatgttgaccagactggtcttgaactcctgacctcaggtgatccgcccacctcagcctcccaaagtgctgggattacaggtatgagccactgcacccggcctcagacttcaactcttgaccacgaatcctcaacccctctgcctcagagcacccagaagcatcttcccaaagaaagatctgaccaaggaactccccagcttaaaacccttccatggctcccagtacccttggagaaaactctgatttctttcaggctctgctccagcatcacctcttccctctctctccccacaacccatgcgtcagccacagctgccttctttttagctcctagactataccaagcccattcctaccccaggccctttgcacttcctgtttcctctacagagagggtccttccccagccccttactcgacctttccgtcattcagctaacatctccatgactttgtctatactcctaccacccgatcactatctctttgtctcagcattttcactgtgaagatgtctccctgtgtgctttgtctatttggccgctaggctgccagtcccacgagggcagggacttctgcccacaacacaagtgtctctcaggtcctaacagagatcctggcccaggagagtcgcaggcaagacgttcaacaaactcctcccttcagtcttccttccgcagcaaccctctcatagggatatctgaaggctggcgaggccaatgttttggtttgcgtggcctttccctagttgttctatgtgtttgctcatctccccagaacgaggccagcattgcagcatctccagcacctaaaacatttgctactaaaccattaaatatttgttaaacaaataaatgtggaggacaagtacaggggaccataaacaccccaggagggactgcaaagagcccggggacggtgggaaagggcattcccagcggtagaaacggcgctgtgtgaaaacaaaacaaaagcctggacgttgcagggaaggaacgccggctgccagtgatagggaggagaggctggagcggtgggagttcagagtggtgttgagtgggtgccgggcggtgggccggcgtcgccctcaccagggcaggcggcgggtaggctcaccatgacttcggcgaagatgtccccggcgtactcgcgttctccctgcagccccagcgcgctcagcgcctcctccagccccggcggcctcgccaggcgtcttggggagacagtggggcccgcggggaagccgtcggggactgcggcgcttgaaggctctgcgtcgagggaggcagcgagactctgcaaaggagagggcctgggggcccagcgcctaacgataggcccgagccgggagccggacccctggtccctgcctctcaccagcatcctccaggagggtgttgcgggcgaggccaagcaccgacccttgcagctaggggaagagacgcgcggcgggcgctttaaaggcccctgggcgcgtgcgcactgagcccgcctcgcccgggcaggtgcacaaaggtgagtgccccgcaggctggctctgtcctctcgaagccctctaaggtcggacagctggagacagatcctcatcctgctgcccggaagcagcccctctgggcctcgctttcctgaccataaagtcgggatgatttcaaaatgtagaatcagggtttgcaccgtcagaggatggatgtacaaacatagatcggaggttagaatgacccttgtggtgtcggtgtcgcaatggaattggagataaaattgtgtgaacacatggttgtttacatagaagttaagtgttgtgtggccgggtgtggtggctcactcctgtaatcccagcactttgggaggccgaggcgggcggatcacgaggtcaggagatggagaccatcctggctaacactgtgaaaccccatctccactaaaaatacaaaaagttagctgggcgtggtgccgggagcctgtagtcccagctactcaggaggctgaggcaggagaatggcatgaaccctggaggcggaacttgcagtgagcgagattgggccactgtactccagcttgggcgacagagcgagactccgtctcaaaaaaaaaaaaattttttttaaaaagtggtgtgtatgcaaacatgtatttcctagcttaatccactgggagagcttaagagcagcgacaccccaatagtgagaagcacccctaacatccaaaccctggccgccacatcccattctccactaaaaggaaccagggctacctggagaaatggctgatcccagggtcatacaagagaaggtacaagatctggaatatttttgtgtggcagaaagtgtcccaacagcagggcaagtcacatagatgcagaagtcactagctaaatctagaaaatgtgagcatcaagatgatagtcatagatcacaaaccactgaataaaattaaaatacaagtttattctgatataactcaggcagtgggaaagaaaagctcttctaatctttagaaagtgaactaataaatgtgttttgttttcagacagggtctcgctctgtcacccaggctggagtgcagtggtgtgaacacggctcactgcagcctcaacctcctaggctcaagtgatcctcccatctcagcctcccaagtagctaggactacaggtgtgcgccatcatgcttggctaatttttaaatttttctgtagagactggggtatcactttgttgcctaggctggttttgaactcctgggttcaaggaatcctcccaccttggcttcccaaagtgctaggattacaggtgtgggccgccatgactggccgaactaataatgtagaaggttggaaaatcctatttggcaaccaccacagcatcgtttcatgcaagaaatatcaatagatgttcaaactagtgggtgaacatctgataggaatcgggatatctacaaaatgtctctacacaagatgtttattaactgtgtaaaccaaaaggtatctgagataggtgtcaatcaatttagaaagcttattttgccaaagttaagggtgtgcgtgtgacacggcctcaggaggtattcggggcacagcttggttttatacgttttatggagacatgagacgtcctcaatatgtgtaagctgtacattggttcggtccggaaaggcaagacaactcgaagcaggggagggggcttccaggtcatagacaggagacaaacggctgcattcttttgagtttgattagccttttactgaatgcacaatttacaggaagagccatccatgcctagtctgggtcaaacaataggacggaggaagccatcagatatgcattggtctcatgtgagcacagggatgactttgaactctgcctgtcttctgtccacaaggaatttccttgcgggcaaatggagagacgtaagtagctttaaaaaaaaatatatatatatatatatatcttttaggccaggcgcagtggctcacgcctgtaatcccagcactttgggaaggtgaggcaggcagatcacttgaggtaagttcgagaccagcctggccaacatagtgaaaccctgtctctactaaaaatacaaaaattagctgggtgtggtggtgggtgcctgtaatctcagctactggtgaggctgagacaggagaatcacttgaaccctggaggcagaggttgcagagagccaatatcgcaccatggcactccagcctgggcgatagagtgagactccgtcttaaaaaaaagagaaaaaaaaaaagtgaggcaaccaaccctggttgagggaaaataactgcaaaataactgccctgtgagtttcacacctgccaactgaatgcaacatgtgagcctggtcattagctaggaatttttaacatacaaggacattaagcgtgaccattagcgaacactataaaatctgtacagaagagcagtttcaatgttagcttcctgaccttggtaactggagagcagttatgtagcagaatgttctttaggacaggtatacaatgtggagcgggaggtggaggggtgaatttaacattctgatcccatttttgtccgttttaagtaaaatgctatgacgaacctggcgaagggtatattttgtaattcttctacataacttttttgaatagattgacagttcccacctaccccacacccaatttccccaatgaacatctcatattagtgtgccccatttgtcacaatccgttagaccaatattcatctattaagtccatgctttattcaagccttcctttttccctacgttctttttctatttcaggaaacattacatttagtcaccatgactcttttggttgatcttggatgtgtcactttctcagaattttctgattaaccaccttggcagacaaatccctcaactgagatctgtctgatgtctgcttcctctcagtgaggtggtgtgtgtctgcaagaggaggatcagagggaaagtgccattctatcacattaaagggacactgtgaaggtgattcatcagcagtgtttgcctcgattggctggatgatgtagtgtttgccagggaccttcactgaaaagttacttttccccctctccacactgcactctttggaggagtcactgcagcccacgcctaagaagtgggggttccatagccctccttgaaggctgtctacagaaattacttatgattttgtgtagatttgcatattctccccattttgccacttagcaatagacttatttcacattttaggtgaaaacccaatattatgctatttattttgttgttcaaattcttttcagctttggccactggaagctttctgttggctcctgtgtccctgtgacttaagcatatcagtgcgtgctttcaggcactgcaagatgccccaggctcatcttgtacatttcctgccccaggcctggaataatcttagtacagcactatttttgaaagttttctgcaagtctgcaattatttcaaaatttaaagtatctgaatggctacacttttttggaaaggtactggacattaaaatcctgggatgtagacaaacaaaagcaccagcacagtacagatggatagctagtttattacaggactgctggtagcaccaaacgaaaccaagtcaattcctgttaacggggcagctgaagcggttgaggggtctaccccatggaaccccaggaagcagctggaaagcctgagttccccccatgcagcagctaaaagggaatcgcactgccgcccccgactccacacaaccatcagtgcacgagggcagcccccagaggcttcacattaactggaaaagattacacaaaaagagcaggaaactaccaatttatgatgccgtgtccatttgcagagaggtaatcagcaccaaaatgagtactcaaggccctgcgacctcgggtgaatttcctttcttatactcctgctttgctgtcttttttaatagcatgtatcatgttttttttttttttatttttagagacacagtctcattgtcccaggctgcagtgcagtgccgcaatcatagctcactgcagcctcaaactcctgggctcaagtgatcttcccacctcacctcagccttccaagttagctgggattgcaggcatgcaccaccatgcccagctaatttttgtattttttgtagagatgaaggtctccctatgatgcccaggctggtctcgaacccctggcctcaagagacccgcccgcctcggcctcccaaattgctgggattacaggcatgagccactgtgcccagtcactgttctttatatacaaaaaagaatgtgtgaaatttttaaaatgtacattgcaaaagacgattattctactcaaaatttatttggtaagattttattaagactctaagttcaaacacccttcttgggaaaagctctacaggataaccacacatgctcaactacggggccagctgctgcagctgtgggaccccatcctgtggaagaggagagaggcactaaaaagatgaggtagccaggcctgtgcccacactacgagacctgcatcaccatggtgtgaggagcagcaacgtgggtcaactcggggctgggacgagatggaagagtaaaaggcctttcttcataggcctgcctattttatgaccaccagggtagacttttgtaattaaattaaggtccacatgactttagaaagacaaactaaaaaaccccaaccaaacgagtcctagctgtagctaactctgatttctgtaaattggatctgactttttctgcttacattcacttaaaatctcaaagactcaatgggtgtgaagtgctaacaccttgcggcaaaatctcaaattcatctgtgccaggccctctgcacagcagggctcagcagggcaggccagggctctggtccctggtcccttgctgggggaggtgttccatccggccagcgcccggccatgcagccacgtgactcaagcacgggaagtgcaggggcccagacacatccaggctaaagggcagtgactaggggagggctgaccccaagctgaacagggttctaaccaaacgctcaggagctcccaggtgacagcaaccacgccaccatgaacacaccactgggtctgtactggaatttgggggcctcaaggcttccaggtggcagcataaacagggaggtggggcaggataggaatgcccccctctgaggctcggcagccgggtggaatgaaccactccctctcattcagtgacagcacaggcaccctcctcattctgggctacccagatcttccagccctgtccctccaccccacctctcttagcctaagcagcactgagggcctggagtggtctctgtccaccccacccccacatgcggggagccttcccatacccctcagccccacagcaccagctccacccaccctctccagcctgagctcctgcacacaccccagctgccctcaccctgagctcagtgccctccttgctgaagggaacggctagtacaggaggagctggggcccaggggtctgactccatcaccaaggcaaagcccagagtggttgggctggcgtgagtgcaggctgggccctggtctgaaatgagtgtctttattgcttgtaccgtacaaatatgaagacgaggagaaaggccagtagggacggagaactgtcagataacaacatcgcacacagaggaaaaagaccctcacccacccgaaccaaccccacccctccccaccctgccatgaactgtgtagtacaggagatgggatagggagagcaaacccacaaaagctaaactccaaacacccagaggtgttgctacagggaggggaggcgtgggcagggcagctcatggatcacagtggggctcctcccactaggtcagcacccctcccccacaggatgaaatgctcgggccagggatggggcccaagcccacacaccatgcacactggaggacacgctgccctcacacaaacacacatgcacacacacccacgtgtgcctgcgtcccgccgacacacgcagtccgaggcacgcacaggagtcccacagcactgacatggacgtgcactcatgttcaaccttaaggctgcagaacgtggggccctggggagagggaggggtgaggggggcctaggagcctcccttttcagaggccccccaccccaataggtaccagagatgcccacccccacccctccctgaccaagtccatggggcccaatactgtccggtgtaagattgtaacagccaaggctggtggccctccacccccgcagaggagagggtgagcccagcccatagcccccagtggggccaggccaggcccagggtccagcgggaggtaaggccagctggaaggaagccctagtaaggcacggggctgggaggcaggcaggtttggccccaaatgttcctcctgcctcatccatagggtgaggacagtttggtggggaggaggccggaccaggaggcggcacccagcccggccactcctggttccccatggtacagatcctaggatctgactccattcaccagggagcagccctaacccccagccctgcagctcccaagggcccctgcctgcccctggacattattgcttttctgcccccatagggggacagcgggtgggggattggaccgccccgtgcctggccactccgagcctaggccacggggcctggaaggcagcaccactgtctgccgggtgtcgcgtcccaccagaaggcagccttcgtccagatgcagcagcgcggaggcagacaccagcacgacacccaggccagaaactcaggcaggccccaggcgccatgcttcacccctcactggggcttgtgtggattaaaacctgaatctccaaccgcccaacagcccaggcctgggcgggaggtggagtcttccaaatgcgagtctgggcacaaaggtgaggctggaggctggaggcaggggctgcaggggccgctggggtgcgtctgggaggggcctgaagaagaactggaaagggggtgaggaggtgggggtggggacacaaaccaaaaaggctaagtaaaaagttagggggaaaaaaccacccagcggtgatggcagcgagcgtgcgtcctctgcgtgggcagactgctcactcgcggatgctggccgagtaggagaactgggggaagtgggtccgctggtccagctccagtaagcccaggctgtcatctgtgggcggcagaggtggatggggaggaccagtcaggagagggcctgggacacctgcccagactccctggggaaacggccccagctggcgggggctgcccacaggacaggacaggaaaggcccatccctccgcaatggaggccctcagccacggacccactccccaaacctgagccccgggcggcctcctctgggagtttcctgtgcccttgcccatgcgccccacagctggcagggccttctgagcctcccaccttctctctgccccacacaccaccatgccagagtccagcccagagccctgtcctggcctgcctctcgcaccctcccatccattctccacgggcagccaggggggctttctaaaggcctgctttaaccctgtccctctctgtatgaaacccttccatggctggctcccgccatgcaagcagtccccacccctcccagtggcccccagacccttgcactccagccccatgccctctcttctcaccaccatctccctggctgctgccggtccttagctatgccatgcttctcccattgctggcatcccacacgtcattcctccggccagctgacacgtttgcttcctcctctagaaagccctccctaactgcaggccaggtcggatatttcctctgggattccccagtccctggcctcccacgccctagccctgaccactccaggccgcccaccctacctgggctgggagctttccagggcagggcccagggctggctcaatcagtgctgtgtccccagcatagcccagccctgggctgagttcagagtaagaacccaaacagctgtaaagcagtgaacccagccaggctcagggaccgggctgcctcctgccctgagccccccgactgagctccagaacgtgctgcagtcaatggctcctggtggcctcaccaggtccaaagaggaccaacagcaaaagggcctgagagcagacttggggaaatctcccagacatgaagcgggggccttcgagggccctccttgagaagtgagttaagagcagatcccatccctccacccctggggcaggcacaccagcgcgggggccccaggcactcacagcggtcagggggtgtgattgtgatggactgggcggtaaattcatcatcgaagtaccttgtgtcgacctcggacgtgacctgaggtttgaagggtggcaggagctacggaggagaggagctcaggctcagggaccctgaggccaggaggcctcaaccaaggtcaccacgagtgggccaggtccctgagggtcctgctggggcaagcagtggggctcaccttcttctggaccacgtcctgccagttgatgctgaggaagaacctgtgctccatgacctccttggcatcgctgggccccccaccaagcctgtgcagagacggccgtcagcacctgcctcccggagcagctgggttcgggcagacgggctttcggagcaggcaggccctgtatggcccttaatgattctgtcttgaccacaaaccacttcacagaggaggaaaccgaggctcagggagggagctcacgtgcccagggtcagagccagggagtcagcaacccggacccacgtgtcctcactgcctggccttaccctgagtccagaaagggagttagtagggcaggctccgttcctatcctggctctgccacatatggtttggtggccccagccaggcccaggggatgccctgttcctcagtgtccccataaaataaggcagtgtcaaggatgggcctgccctgggggaagcactccctaagtgccactgtggacgttttcaggggctgtgtggggacgacacactgcgaccctacaagcgagcacccttgtggacgctgccccctccaggccgcagggacagtggcagcagctggcgctgggctgggtggggccgacgccagccctcacctctgcttggggtccttcttaagcagcccagcaagcagggacttggcctcggggctgagcgtgcgcgggaagcggatctcttccatgaggatgagctcgaagaggcgctcgtggtcctggttgtagaagggcaggcggccgcacatcatctcgtacatgaccacacccagcccccaccagtccacggcccggccatagtcattgtcctccagcacctgaggatggaggagaaatgagggctgggcccgtggccctgaggctggcatcacagtcctgccctcagggcatctgggctggaaacacacaggtctgggggatccccctacccttggcctcacacgttcctacccccaccaaccccagacacctcaggcgccaggtactccggggtcccacagaaggttttcatggtggccccgtcactgatgccctctttgcagaggccaaagtcagtgatcttgatgtggccatctttgtccagcatgaggttttccagctgttggaaaagtcaacggatctcaggtgcatgctcccaaggcttcctgccaccccagcctttccttccagggaaagatgcccggggctcctggacatcaaccctcccatgccaggctgggcccagcacacacagcctcaccctctgaggctcagagagaggccagatccaaccctcctcaccctctggcccacccccatggtacctgggaacagctgggcagggagagccgagagccaggccctgtccacccaccgtccccattgtgaactgtggttcttatttcgaacgtgggggcactagctttcttctattctttttttctagactttctgtcctttaattatgaaatatgcagccaggcaaagtggctcacacctgtaatcccagcaatttgggggacttaggtggcaggattgcttgaacccatgagtttgagaccagcctgggcaacacagcgagaccccatctccatatttcttaatatgaaaaaaaaaattagccaggcatggtggcacacacctatagtcccagctacttgcgaggctgaggtggcatctccccctggaaggccctgtgtgcccctcccggttactgaccatcccccacaagaattaacctctacttcccatctgtaccactgcacacagacacacctgtgaactgtggactcacctcctctgtgcggctttccctcgacattagcctatgagacgcgtccacactgtcgtgtgtagctgtagctcattcctaactgctgtgtggcgtcccactgtgagaacactccacagtggatctgactgttcctctcacagtggatacttgggttgttccagttggggctagagtaagtcctgctgctgagtgagggggacactttctaaggtgagtgtgtgtccccacttctcctgtgcacacagctagggcagatgactggtgctcagctttggtggacactgccaaactatcttctaaaattggccgggcgcgggggctcatgcctgtaatccaagcactttgggaggctgaggtgggtggatcacaaggtcaggagtttgagaccagcctggccaatatgatgaaaccccgtctctactaaaaatacaaaaattagctgggcatggtggcgggcacctgtaatcccacctattcgggaggctgaggcaggacaatcgcttgaacccgggaggcagaggttgcagcgagccgagatcacaccactgcactcaacagagtaagactcctcaaaaataaataaataaataaatacaaataaagtaggtattgtggcagttgacactccgctagtggcctaggagcgctcatgggaggcttgggaaggtccctacttggggcaacttgccacagagccaccaccctggaccttggtggggagcctggtgaatgagggcagccaccaccctggaccttggtggggagcctggcgaatgagggcagccaccaccctggaccttggtggggagcctggcgaatgagggcagaagctcagcccaacttccccagtgtgagtcccatgtggtgtgcatgccacaggtcagcctggcgcacaccctgccactaaccttgatgtcgcggtataccacgtcccgcgagtgcaagtactcaagagccgagacaatctctgcaccataaaaccgggcccgctcctctgtgaagacacgctcccgggacaggtggaagaacagctgcaggaggaaggggtggggagaggaggtcaggccccagcccacccacctgccctcaccttcccagccccctgccccagcgcagtgatgtggtgacacctgtatcatgaaccagcaagtgacagctagagggaccaatcaaggcagagcgcagaagctcataagtgacacagagctggggggaagggcgagggtctgccaggaggcacccatgagagggtatgggagagacatccgagacaggagggaggatggcatggaggcaaaaagaagcacacgtcatgaccaagtaacaataggccatgggcaagcccagatcagacagatgagcaaaccacgcatcccaaagcaggtgtgccaaccactgcacagagaaggcgcgaggcaaggagtgggtgacaaaagtgaggcgactctgtaaggggaagctgagcggctgcgggaattcacttcgagaggacacgggaacggagggctgctaggttttaacccttgggggctttctctggggcctttaagaccatccttcccagtgctatcgccccacagccctctccacacctctctggactggtttggacctgacccacccactcactagctgtgtaaacttgggcaagccacttaacctctctgagcctcagtgactgcccccccaaaatggagacgaagccgcctgcctcaagggagaggggcactagatgacactgaaatttccctccacccttccatctcacccacagctcctctccatcccgccccaccctaaagaaggaggccccagagggcaaagtcaaggcagccgcggctcacctcacccccgttggcatactccatcacaaagcacaggcggtcgtgggtctggaaggcatacttcagcgcctgggggatgaaggcagcagggtgggaggtgggagggaggagggctctgctgagccatgccagggcagggccctggccctgcttattctgcacacacacaccctgccctggctggggcccccaggagtcagccatatggggttcacataccggctgcaccttttggggcattaagtgaaggcatggctctgcggtaggaaagggttacatgctgaaccatcttgtcctctgcctccatcaggcacagccaagggagaactagagctgttctgagcaaccatggctcttgtttttacagtaaaatgtgttcaacttacacacacaagtgatgtctgctgtggctgggagtggcaaaggcttgggagccaacttcaatgacaggatggacaggctgtcagtcaacaaacagtagttctccactgcactaaggagatctacagagagttcctcagagactcccaccagggggtccttcagctcatgacaactcaactattctgttttctgcactgaggtacctcataagattttatttgaaaaagtactgtggcttaataggatacctggacagcaactgagataaagaaatgatacataagccatcctcaatctagtccatttaactggtggccactggccttgatggagactgcagcccaaacaggcatctactcagtccaggctgacagacaacacaatgctaacacatctgcttctatgagcatatctgaaaacaaaaacaaaaaaaataatgtttccacttcaaccagctgggctaagtgctcctaactcatagagacagcagccagcaaataatgtgatatcttcagttagttcaaatgcttacatgaagccaccatctatgaagaagctgtcaccctcccactccccgagcctgctcacccccaccacatgtcttggttcggatgacttggcagggcgcagcaacaccttgccctgcccgcctggcctaccccaagactgtgctttgtaccagaagattagggctctctctctgagctctgtccaaaggctggcctcacactgtctgggaaggggagggcaactcacagtgaggaacgggtgcctggtgttctggaggacccggctctcggtgactgtgtgagcgacttcatcctgcagacagactgcgggtgaggggctggtgggcaacaccacacctgcccactccgccccgacgaaggggagcaaggccttgtgaaatgcaattccattcccagccataaatgcagaaaatcacaggagtgaaaagtgaaagcctgcaaaccctcagcaaatagcagacccagacgaggatcatcagtggctctcaaagccacaggtgaaaagtcagcaggaatgtcacaatgtaaggaccaggctgctagggacaagacacctgtgacgtccctgcaagggagacaaacagacatcacgagagccccgaggtgccaccacaggctgtgggaagtcccacctagaaagcattcttgcccaaagaaggaaaaacagtgcttcttggtgtggtccccacacagcacctcagcaccgcctgggaactggcagcaatgcaaattcctgggacctacccccaggcccactgagtcagaaactcggggtgggcccagcactgtctcacaagccctttgggtgactctaattcaggttctaatttggtacctgactgtacagcagaaccaccaggagtggttccaaaaatctggagccacctgcagcaacgtgaacacaggctctctctggggcaagtttatccccaggggacacctgagaatgtctgaagtcttttttttttttttccctttttttttttagctgggggtctggctctgtcgcccaggctggagtgcagtggtgtgaacatgggtcactacagcctcaacctctgaggctccactgatcctcccacttcagcctcctgagcagctgggactacaggtgcacgccactatgcccagctaatttatttttatttttacagagacagggtcttgctttgttgcccaggctggtctcgaactcctgggctcaagcgatcctcccacctcagccttctaaagtgctggaattacaggcgtgagctgtggcgcccaacccaaaagtcatttttgattgtcacaacttggggagctagtattggcttcagtgggtagaagccaggggtgctgctgaaaccctagaatgcacagggctgccccgacagcgcagaatcatctgtcccaaaacgttaacagtgctgaggctgaggaaggctgccttaggcccaatcgtcacatcaggaatgaacagctaatttggttggctctgatggcagcaccacatgattatattctttacagtcttcatctgtcaggacacatgttcaagtatggatgagtgaagtgacgtgttgtctaggacaggccttaaagtattccagaacaagagggacaggcagagctaaggaaacaaggctggctaaacgctgataactggttaaactggacaatggctacatgggggtccgtaatatttattttctttttaaatttttgaatgtctttggaatcttccactacaaaaaattcaaataagggaaaaagtagaattccactcctggcccggcctccacctgggataccctgagcaaagcccgggactccccaacagcgacgtcctccccaacaggccccagcctcccttgacagtacctgctgggtggggccccgaggctctctctctccacaggcacccccagcccctaacatagggtggaggtggggactcagcagcaaggcctgctgctcctctctgggcctcaggctcccccttttctgactagggggaatttgtgggggaaataagcccacagcagcagaaagcgcgggtaagcgtccaggcctcagggtcaggctccagaccgcagcccccacagaggctcgcgagcgcaattcccggggcacgcaccttggcaatgatgacttccttccgcaggatcttcatggcgtagtagcggccagtggccttctcccgcaccaggatgactttgccaaaggttcccttgccaaggagtttgagatagtcgaagtcattcatggtctgccagggacagggagagtgggggcagtcagcgcctggctcatggcccgtgggaggaaattttaacaaaagaaagaggaaaaccaaaagacactgttgccaaacggcttaggctggagcaggaagggaggctctgggcagcaactgtgtgttctgaagcggccttcagaccaggctctgcaggcacagggccttgggagggctgggctctgacgtgggggtagccaggtcttcaccaactcccaggacgaacctgcagtgggtccacccaaggttgctccctcccctacgggcatggagcacaccctagggcacctgccacctgaaatcaccccaccctgcagggcagccttgtctctcagctgagccccctgaactgtgttatggaaaccaaggagagcaggccagcactgggggtgggggcaccgcaggctggcagccccacccctgctcccagcacttaccactttagcccgtgccttgctgaccgccacttccatctcctcagtcgtggaggagtcactgggggagccacacttgtagtccatggggtcctcgcctggggcccgctgcttgaggctgttggcgaccatctggatggcccgcatccactcctccctgtgcagggacacacgtgagtcccagcagccaggagtcctgggcctcagagtcgaacagctgagtgccacctcccagccacccccagcaacaggcaagcaaatgaccacataaccatgggaatttgggcaagatctgtcagaaccagagagagctgaagggacctgagtgaaattccacgccaggcgcagtggctcatgcctataatcccagcactttgggaggctgaggcggatggatcacaaggtcaggagttcgagaccagcctggccaacatggtgaaaccccgtctctactaaaaatacaaaaattagtcaggggtggcattcgcctaatcccagctactcaggaggctgaggcaggagaattgcttgaacccgggaggcggagggtgcagtgagcagagatcgcaccactgcactccagcctggtgacagtgcgagactccgtctcaaaaaaaaaaaaaaagtggaataccaagagcgatcaccaatttccctaaagtgacctggcctgagggccatttgaagccaggcagcagggaaatgatcaaaaaggagtgaccctctcttttcacagccccttgaaaatgagccaccaccctgagccttgaatgagggagagagagtgctcctgtgaattcttcggaacaaatgacaagctcaagtttataagttaccaatgttttgtaaagttaaaccaagagtaagaagcagcattcattagccaaaggagctgaagacactgcaaggcaagagctggcccgcaggactccctggaggggacagtccactgggagcagggagtctgcatggcagggacagaggtcctggcagcccagggatgtagaggagagaagctggtggacaagaagtaggtcccagcagaagggagcctggtttaagaacagttaactagaggctaagcactgtggctcacacctgtaatcccagcattttgggaggccaaggtggaccaagtgcttgagccgaagcgttcaagaccagcctaggtaacaaagcaagacccatctcttaaaaagtttttaaaaaacaaaaataaaaaataaaaacaggccaggtgcgatggctcacgcctgtaatcccagcactttgggaggccaaggtggaggatcacttgaggtcaggagttcgagaccagcctggccaacatagtaaaacccagtctctactaaaaatacaaaaaattagccgggcgtggtgacgggcgcctgtaatcccagctactcgggaggctgaggcaagaggatcatttgaacccgggaggcggaggttgcagtgagccgagatcgcgccactgcactccagcctggacaacagtgcgagactccatcccaaaataataataaaataataataataataataataataataataataataaaataaagaacaataaactagttctgtcactcatggtttagaacttgctgagaaagaactgtctttgagctgggctcggtggctcacacctgcaatcctggcactttgggagactgagacgggacgatggcttgcatccggaagtttgagaccagcctaggcaacatggatacccactttgtagagaccaaagataaaaaattagccaggtgtgggggcacatgcctgtggtctcagctactcagggggctaaggtgggagaactgcttgagcccaggaggtggaggctgcagtgagccatgatcataccactgcaatcagctaaaaaaaaaacaaaataattttctttggatacttacaaactgttctgtctaataagtgaaaatgaccagagaccaaaatgaaaaatatattaggctgaattacaccaaattgtccacatcccccatttttgaccacactgcaattaggtgtttcaacccaacgcattttgaaccccccgtgtattttgcttgtatctagaaaatactcatatgaccaacaagaaaaataaaatgttcactaagaatgagaaaattcagagagtgtaatcacgcaaatcccagtgatttaaataagccacagggagtgcagccagcccttcacagcatcttccaggatggcccccgccccagggcaagtgtcactgctcctgtgttcctgagacactggggcccctacccaaggtcaggcagggaacaagtgtggctgggactgggcttcaaaatccaagccgggacaccctgctgggctgtattcctccccagtctcgtttcctggtgtaccacgcgaaactacttctatttccatccatcccacaacgcaccctcttccacattttgacactgctggaatgcagattaatctcacagttggggtctgtcttgatttaactgggcacgcctttttcttggcactatatgaaacagggtgcctccccaatgacagcgccttcgatttgatgaaatatcacagcagtgtttaatacacaggctgtcgtgaggtagaatgcctgtgaggcatctgtgcaatgagacattctgcagctgggggaaagattgaggcaggtctgtatgctgacttgggatgatctgagacttcttaagagaaaaaggaaggtgcagggatgggcaaggtagctcactcatgtaatccctgcaatttaggaggcagaggctggaggactgcttgagcccaggaattccagaccagcctagacaacataagaagaccacgcctttataaaaaatttcaaaattaaggaaggtgaagaacagtatacagttctgtgctcctaagttagaaaataatgaacttctgcagacacatgctcacataggcacaaacatctccagaagagaagtcatgatcctggagccctgcctgcctccaagggaggggaactgggagtcgaaggaaaggaacagcctctaataacaaatgggaagcacttgctatcatcaactatccctactcccacccattatgaaggaggaactggggcacagattgaaaaaacagattccagaaaaacagcagttgctccaggcttggtagctggaattacaaaaggcacgctgccctccccacccactcagagactggagtccccataacccatctatgtccaccccacggaggcagagatttccacctgctttgaacacagttctgcccccagaactcatggtggatactcagtagatacttgggtaatgaaagagtgaggcagccaaagtccaagtggccccagggccagggcgcagcagggcccagtgcagacccgggcagagcacgcactgagccctggtgcacacccgggcagagcggtgttggcttctgcactccctggcccaacatctcaagccagtatttctcaacttgctttaacccatgcccccttaggaacaaattacagcctaattcccaaaccctacactaatattcctgtttttcaaaaaaaaaaaaaaaaaaaagcaggggccggggacagggcaggagcccattccatgacaggcttttttcttttttgtttctttttgtttttggagacagagtctcgctttgctgccaggctggagtgcagtggctcccaggtttaagcgattctcctgcctcagcctccagagtagctggaactacaggcacccgccaccataatttttgtatttttagtagagacagggtttcaccatgttggccaggatggtctcgatctcttgacctcatgatctgcctgcctcggtctccccaagtgctgggattacaggtgtgagctgctgtgcccagccttccatgacatgctttatcagacatagttgtcctctcacaaattttaaatttttttaatgctgactctgagtaaatgatggcggattgggaaaaaaaaaatcacagatctcctaagagatacagtgaagatattaaaaaggaaaatatgtctctcatatataaagatcttgagagactgtcacgtgaagatggcagattgcagactaagatgtacagcgtggtatcatctttgttttcaaagacaggggtggagagaacacagatggtccctctgtggagagaacccaaatacatgaaggatggcactgccacaccaccagcccagaagcagctctgggaggctactccagatgggaatcaggagcacaggccctggacccaccccagctggggctccaagagtggctctgccacctggaccagctcagccctcccagctctcccctccaccagggcctgggcctggggctaagaggttggcgggctgtcggcgcagagcaccgcgcgcagggcggggtggaagggagggtgccgaagacactcgcaggggcgggcctaccccacctaccctggctcccactgcccaccctacagaaagctccagaaaccacagcaatgcaggaggttatctgggagtaactggggctcgcctgctgcctgactagcttccgatccaattctaactggaccaaagttgcaaggttgcagcactcagaattccagatgaaaagcaagggcctctgtccaggatccttctcaagggtttgcaacatggcgtctggggcaaaggggagctccccatgaagctgggcctcaagtatcttctagcccccagaggagagcccctgggtaaaccacgactgtaaaaataacagcactgagtggctagctccagacaccacctcgcttgattctcaagagcactgcaattctcaagagccagcatttctgctgtggggactgaggcacatggaggtggagtcacctgtgaaggtcacacagcagggatgtggcagagctggcactcacctgtgcacagcctactcctccttagcaccacccgcctgtccctgagcctcagtgaagcgctgaaagctacacgagactcaggagggtaaagcagggaccctctctagggaaggctcatgggacacccagccagggagcccacgggaaaagcaaaggaagaactctcctcgtaagccatgatctgcacccgcttttcagagaggggcccccacccctgccactcaacagcagtcccaagaacaccttccacttgcagaggctggtaccactgtgcgttatggtggaggactcctgtcgccctcccagcaaccctgtgtagtaggtactgccattcacttcatgctaaaatgacaagaccgaagcacagagaggctcatctgcccaccgacagaggccagggacacaagaagtgcccaggcacttctacctccaagagcacttcccccatcggtattttctggaaccttctcatcctcatttgggctcagggccaggggagggacatgggggagccacgttcgccataccaacactgggaagggcacagtacggggcaagcacaggctctgggccaggagctgtggggtcattgccacccaatgcgctgcctgccttccgtaccagctggggacctcacagtgggtgagaggacaggctctgggggatggcctggacgtggatcccagctctgccccttcctgcaggcaacactgggcaggttgtatgcccttcctgtgcctcggtgggtgaggcactagagggtcctatcagggtgaaatgagacactagacataaagtgctgagagcggtgcccagcacattgaggtctcagaaggctgtcatgagagttcacccagccggcctgcaaatgtggagcatttctgtgcaccaggcttgttcagggcactgtggatgcagcaggggacaagcccatcatggctcctgacctcaaggggaggacaagtgtgtagaagctccaaggcgggggccaaacagggagactccttctcagagggcagtcaggggaggcctgaggagatgacgtttaaaccaggacctgaacaatggccatccccagtgcctagaacaggcccttggcacacagctatgaaataaatgaaatggagggaaggaggcaggggattgggagggaaaggaacccaggcagagggaactgcatggcaaagaccccagggcaggagcaagctggggtgtctgtgaaaggcacacaggtgccagaatggctggagccaacagagaggagtggaggagatgaggacagagaggagtgcaggagatgaggacagggaggagtggaggagatgaggacagggaggagtggaggagatgaggacagggaggagtggaggagatgaggacagagaggagtgcaggagatgaggacagggaggagtggaggagatgaggacagggaggagtggaggagatgaggagagagaggagtgcaggagatgaggacagggaggagtggaggagatgaggacagggaggagtggaggagatgaggagagagaggagtgcaggagatgaggacagggaggagtggaggagatgaggacagggaggagtggaggagatgaggacagggaggagtggaggagatgaggacagggaggagagcatgcccagaccgctccggcctctacgtgccaccatgttagagatctgggtcttatcctcagcaccacaggaagtcgctgaagggttttagtcaggggggaacaggctccaaatttctgttttaagtcagtagctgctgtgtgggctacggactgggggcagtgagaggagaccccggcatcctccaggaaagagatgctggtggcagaggagacagaggtaagaaaggtaccagtgctgcgtgtgccaaagctgccatgggcaggccctgcgccagtgccttcatgtttacttcctcctctacaccacatgacagccagggaactgagccccactgagggagagacacggcagctggcctgaatccagggcctggaccccagccctgggccatcctgcggggcaccccagagagaagctcggcgaagcagaggtggcagggctgtccttcatgcacaagcccgtcctcaccgcttcaggagtgacagctgactgtggggactctcccctaaccatcacctccccgacctagaggggcatttacagctggagggcatctggggccctccctgtgcacagatagtctgccttgtgaggagaaaataaattaatatatgaaaagtcctcggaacaggatctagctcagagaatttaattattttttatttatccaacaaacatttactgaacacccatttgtgtgccagatacatacataaatataaatgtcccacttggtggacaggtgctatgaagaaaagcacagctggggaagggcaagacagcgaagggaggcagggcaggacgcactggggtggcaacactggggcagagacctcgtggagtcggggagagctgtgatggcatctcagggaggaaggccttagacaaacgcgacagcaagcgctgaggccctcgggcaagagatgtgctaggcatgtttaaggaacagcaaggagacacgtggctaagtgagggtgcttgtggtaggaaatgcttctggagaggtcgctggatcatacaggactctgcaggacacagcacggaccttggagtttactctgagtgggagtgaaagccattcagagttctaagcagagaaaatacatgataagatttacatcaaggccaggcacggtggctcacgcttgtaatcccagcattttgggaggccgaggcgggcagatcacctgaggtcaggagttcgagaccagcctgaccaacatgagagaaaccccatctctactaaaaatacaaaatgagctaggcatggtggcgcgtgcctgtaatcccagctactcaggaggctgaggcgtgagaatcacttgaacccaggaggaagatgttgcagtgaaccaagattgcaccattgtactccagcctgggcaacaagagtgaaactctgtctaaaaaaaaaagaaagaaagatttacgtcaaaaagatcacagatggccaggcacagtggctcatggctgtaatcttagcactctgggaggttaagatgggcagatcacttgagcccaggggttcaagaccagcctgggcaacatggtgaaaccccatctctacaaaaaatacaaaaattagcctggtgtggtggcaggcgcctgtagttctagctactagggaggctggggtgggaggatcacctaaatccgggagattgaggctgcagtgagtcgtgattctgccactgcactgcagcctgggcaacagagaccccatcaaaacaacaacaaaaagatcatactcacctgatgcactattaagtattcttgcctgccaagaccaggggtctgcaaactttttccatcaaggaccagaaagctgggtgtggtggtttgtgcctataatcccagcactttgggaggtggaggagggaggattgcttgagaccaggagttccagaccggcctggacaacatagcaagactctgtctccacaaaaaaatttaaaaattcgccaggcatggtggtgcatacctttagtcccagctactcaggatcctgaggcgtaaggatggattaagctcaggagtttgagactgcagtgagctatgattgcaccgctgcactccagcctgggcaagagagcaagaacttgtctctaaaaaaaaagttttaaatttaaaaaattttaattaaaattttaaaagggccaattattaaattttttaggctttgcaagacagtctttgtcacaactacttaacccagccacagtaagccaaaagcagccagactattcatgaacaaatggacatggtcatgttccaataaaactttatttacaaaaatggaaggcagggccatagtttgccaaccctgttcctggcctaattctagtttacaagaaatacaaacatggggaacaaaagtaaacaacaccaaaaggcaataatatgacacacccagaaggtgtgacattctacaagacaactagcctggcttgtcaaaaaaataaataaattaataaaaaatcaatgtcttggggaggaaaaaaaaagacaaagggctgaactagattaaataaaacaagtcaaagagacatgtaccttgaatgaatactggttttaaaacaatgttctaaaggttgcatatccttcaaaaggtaactaaagaaattcaagtacggcatggataaggagaagttactagtaaacaaagattataatcatctcaggcgtgacagcatcatgattctgtaggagaaagtccttattcttaggagatgcctgctgaaacactaagaatgtcactaagtatgaacacaagttcaagttcagcataaaacacaaccagatgaagcagacacggtgaatgcgggactgcagagtctaggagtggggcgcgtggatgtccattcattatactattctttcaacttttctccatgtgaaacacgtctgcagtgaagtgggggacagggaggagggtctctccagctggagaggcaaccaggagcccagtgaggaggcgctgcagcacctagccaacaagcagtcaccgactggcacccacctgccctgcaacccctgcctccctccccaggcttaagagaggccagctgacatcagcctgtgtgggccagggctgtgaggacagcatcagtcagccaggagcagagtggagggggcctccctcttgctgggtttctggttcaccccctccacccacccatagttaaggtcagaaatctgggacctggtctcttagtcgttccagcagttttctctttggcaacagcagcaggtaccaagaagaaaaggcaggtggggctctccagcctacagaatcttggtaaaggaaagggcatgttgtcttgtgaaaatggaaacgagaccatctctcctgcctactaaaacaccttgtcagctccaccttgtcagtacctgatgtgccaggtactgctgcatcagccgctcctatttatcattcccctgcatcgtgtaactaccctgggacaaaccgcaatttactaagtgcctgccaagccctgtggggatctccacctggagtccaaggccttggctgagctctccagcttcgagcgcctccacttcccctcttccaacactcctggccccttggttctctggtgacacagaaccccctgtagtctctggaatgcatgagctatttcacctccaggtctttgcatatgctgtcccttctgaactttctccttgctatctccgtggccaaatcctatccagtcttcaaaacccagctcaacacccaggacctatacacccactggtctcgatctgtttttactggccattcatgttttggtccatagttttcaactgagtagcacctcagctggcttgagatggtaattttgttcccctcagtggggcaagtatattttttaccttgggaggatgtgcaacaataattatagtatagattatagtaacaagtctcatgatattgtgggttcctgagctgtactgtccaagaaggtagccactagccatatgtggctctttaaatcaattaaaataaactagaaaaaatccattccttggtggctgtatttcaaatgctcaatcggcacaagcagtcagcacaggcaatcggcacaggcaattggcacaggtgcctactggacagtgcagataaagggcatttccacaatggccggaagttttcttggacggcatgattttagggctctctagagggtctgctgaaaccttaccccatagataagctagaagactgtttctcaaagtgaggcccaaaaggacaaagtgggaaaaagaaacatttcccactgattacaaagggcaaagctccttaatctataaagagctaatacataaataagaaaaagaccaactacccaacagaaaaatagacaatatagacacttcagaataggaactcacatggcccttgagggtcaaactcatccacagagaaagaaaggaaagttaaacaccccgaggtgctgaatttttccactgctcagactggtacaaatccaaatgtttgaaaacacaaggccatgggggcactctcagacatcgcctaatagaaacatcgcaaaaccacaaacttattttccctgtgcctcggcaatcctgcatctaagcactcgtcacacaggtctacctgtgcacacatcaaacgagacagacacggctatttcactgcagcattccttataatgagccaaaggctggaaacaaccccagtcatcacaataaagaacggctaaataaacacacttgggacacgcatgtccaactgtccaaaaaaaaaagcaaaacatgaaacaaagcagctgcatctctccatatatcaaggcaaattccccaaggtacactaagggaaaaagcaagtccagaagcatgtacaatgctaccttttgtatttaaaaaaaaaaaaaaaaaggcagccaggcacaaaggtctccctctgctctttgagggcacctaagaacagtgattaactggggggcagggaggtggatggaaagggcagggtaggggaagctcccactagacacctccttatactgtttcaattttgaaatagatgagtctttatcatctcttctgattactaaattgatctttttaaaatgactctctggaccacctgcctcaaaatcaatagagatgctcattaagaatgtaggtcctgccgggcagggtggctcacacctgtaatctcagcactttggaggccgagggagatcacctaaggccaaaagttcgagaccagtgtggccaacatggcgaaatcctgtctctactaaaaatacaaaaattagccagatgtggtggcacgtgcctgtaatcccagctacttgggaggctgaggcaggagaatcacttgaacccgggaggcggaggttgcagtaaactgagatggcaccactacactccagcctgggcaacagagcaagactctgtctcaaaaaaaaaaaaaaagggggtcaggtgtggtggcttgcacctgtaatcccagcattttgggaggccgaggcaggcggatcacctgaggtcaggagtttgagaccagcctggctaatatggagaagccccttttctactaaaaatacaaaaactaagccgggcatggtggcacacgcctgtaatcccagctacttgggaggctgaggcaggaaaatcgcttgaacccaggaggtggaggttggaggttgcagtgagccaagatcatgccactgcattccaacttgggcaataagagcgaaactccatttcagaaaaaaaaaaaagaatgtagctccctgaccctgggcagatctccaggtagtcacaggtcttgaggcgaggcccagcggtctagacatttcacgagctctgcctgtgattccgatgcacccgcaagtcaaagggcagagtagggtcttcagactaagaaccccagctcttctcagccccagctggagagaccccccaaccagaagcgcagataggaaacccctatgtagggtcccagggaaaatctctccagctgtaccttttctcctcacaccaggcttgctccctctcaagggcagccacacagaggcccagactgacctctcgtctggagaatccacgtggaaggtcctctcgatgactgtggtccactgcaggcagcgtatgacaaaggtgttgggtcgcggcctctcggtcttcatcagctggcattctgcaggcagagggaacagacagcagggggctgaggggatagccctgctagcctgcagcccaaagtgcccgagccacctcccacaggcctagccccatgctagatggtgctggggacactctagggactgagacagccctggtcctgttctcacagggctcagggtctagtgtgtgtgtgtgtggaaggagagaagcccaccagagagtgatggctccatagacagggccgcgatggggacaagcctagaggtgtgcagaagctcagaggtagcatccaacccagcctggggggttggggggcttcccagaggaagcagcttctctgaactaagccctgaaggaaaagggaacttagagggtacacggagaacagacgctcagaggtgagaggaggttcaacatcctcagggggtggccaattctgctccaagggtgaggaggggtaagtgagagacagccctggagaggtgggctggggccagccaggcagggctttggaggccatgggaaagaatctggactttgtcctcagggcagcagggagccatagaaggctttagatagggaagagacacaaacagactgagaatgatccctctggctgccatgtagagggtgaggctggaggttggaaggccagggaggtggggagccagctagggaggatggggccacaccagagtggagccctgcagacaggccatgggaagagggcactgaggaccaggcccaggcctctcggcctgctgtccctgagacagagacaggaatagagctgggagaggcctgaaggtcaggttgggatgtggcacttatgaggaccttgaagacacttggggagatgtgtccaaggagcagcctgggacaggctgggagttctagtgagacactgaggttgggaacagatgtgtcagggtcaccagcacatgtggagagcaatcaggaaaaggcttcatgcagagcagcgtgggacggggactgggttccacagcatggcaggagaggatagtggtctgagctaaggcactggcagtggagatgggggtgcctctgtaatgttcttagcaggcagaacaacaggacatggtgacccatcaggtcagcaaggaaggaaggcggcagaaaggggcagcgatgtggacaggaccatattctccaaggctcagtcaagagcttggggcttgtgaaacttcactgccagggtctggctggaagacatccctttgggtattacagagggacagaggacgcgaggccagccctgtgaccagctgagtgggaagctgtgacccctctacgtccgagggacagaggatggaggctgttaccaaagcacaggatgggaggcacctgccaccagttggggactccaaggcctggctgacagaagctggaaccacaaggaggcgatgcatggggctgggtgtgggcaaatgccctggcttctccctccctcccactctgcatctccccgcaggacagccccgcctggccagctaacaaggagggagagcaggggaagggtgaaaacagatccaagggcaagcaggcccaggacaggcccatggctcaatgaccaagtcccacaagcccctaagacgtgccagccatcctgtgagcaccagaacactgacccactcatcccaagacacacctgctacggagaagttgtttaaggggggtagagtctgatcaggggcctcgggcctctccttgtacccaatgaaggagccgtcgctcttcagcaggaagtaccgtggcctccaggtcttgatgtattcacctgaaatgaggcaggaagggagggagagaggttaggacaaggttgagtgatgtcccaggtaggcggcaggaggcccagtgtgacggtgactcacaaggggtaccacggggcggggaggtgcgggggacacacgagaatgcctctcccagaggagccctccaggtggcccctgctgacgcaggctggggcactgggctgagcccgggtgatccacaggtcatgcctggcaggaaggtgccagcagcagtgccctggggcaccagttgcctcagcgtgtggcaaggagcaagctgtctgtgccagctcctggcctagtcccaggggaggcccaggcttccaaacacacatgccctgtggccctgtaaggccaaatcccatgggctgggattcaccaatacagctgtgcaggtagctccaatgccaaaacacttctgtgccaggcagggtggcactgctgccacaccctcccagcgccccttgactctttccaactgttcttcaccatgaatatccaagcaccctatgcacacaaacacacacacacacacacacacacacacacacacgaacccactcatcagagagctgctaaggattaaaaggagatggtgaaacacatccacacaaaaacttacacacaaatgtcctcaacagcattattcataacagccatcgagtggaaacgaccctaatgtccatcaacaacgaatggataaacaaaatgtagcagattcatacaacggaaaactattcagtcataaaaagaaacgaagtactgagacatgctgccatgtggagggaccgtaacttatgctaagtgaaagaagccagtcacaaaggaccacgtatcattatgactccatttatataaaatgcccagaacaggcaaatctacagagatgaaaagtagggcccggcacggtggcgcacacctgtaatcccggcactttgggaggccgaggcgagcggatcacctgaggtcgggagttggagaccagcctgaccaacatggagaaaccccatctctactaaaaatacaaaattagccaggcatggtggtgcatgcctataatcccactacttgggaggctgaggcaggagactccttgaacctgggaggcagaggttgccgtgagccgagatcacaccattgcactccagcctgggcaacaagagcgaaactccgtctcgaaaaaaaaaaaaaaaaaacaaaaaaaaaaacctgagtatggtgatggatgcacaactctgaacatactaaaaccaactgaactgtatgctttaaatggatgaatcatgtagtacatcagttttacctcaacatggctattaaacaccagcacagtggctcccacctgtaaaatcctagcactttgggaggctgaggcaggcttaagtctggagtttgagacgagcctgggcaacatagtgagatctggtctccacaaaaaatgttttttaattagccaggagtcgttgcgtgtgcctgaagtcccagctactcaggaggccgaaatggcagaatcacctgagctcaagaaattgaagctatgatggtgccactgcagtccagcccagtgacagagcaagaccctagctcttaaaaaaaaaaaaaaaaagcatttacaaaagcctccaaaaaaatacttaaccaagggggtgaagggcttgtatactacaaaacattgtttaaagaaattagagatctacataaatgcaaaaacatcctgtgtgcatggattagaagacaatattgttaagatggcaatactacccaaagcaatatacagattcaatgcaatccctatcaaaattccaacaggctttttcttttttcagaaatagaaaagccaatcctcacattcacatggaatttcaaagggccccaaagagccaaaataatattgaaaaagaaaaataaagttaaatactttccaatttcaaaatttactatacaaagctatagtaatcaaaacagtacagtttatacaggacagacatacagaccaatggaagagaattcagagccaaaaaataaacccaaatatctacattcaactgattttcaacacagatgccaagatcattcaatggggaaagaacagtttcttcaacaaagagactatattttttcaaaacgaaagaaaagaaacctagaagaaaaaatatccttacaattttttttgttaatttaaatactgttccttgcagagcagggaacagtgacccataggcaatgtgcccagagtagcctatcctcacaatcttatccctattttgcagatgaagaaactgaggcaactggatatccacattcaaaagaatggatatcacattcttttgtgatatcctacttcacactgtaaaccatatacaaaaataaactcaaaatgaattgacctgaatataagagctaaaactacaaaaaaagtctaagaatacatgagtaaatctcattactttgaatttggcaatgaattcttagatgacaccaaatgcacaagcaacaaaaagaaaaacttcaagtgaactcatcaaaattaaaaacctttgtgcatgaaaggacactgtcaagaaagtaaaaagataacctacagaatgggtggaaatacttggaaatctaataagggtctattaaccagaacacataaagaactcttacaatgcaacaacaaaaagacaaactgcctgattttaaaatgagcaaaggactcaaagagatattcctccaaagatacacaaatggtcaacagaaagatgaaaagatgttcagcatcattagtcatctggcaaacataaatcaaaatcacgatgaaggccgggcgcggtagctcacacctgtaatcccagcactttgggaggtcgaggcaggcggatcacttgaggtcaggagttcaaaaccagcctggccaacatgatcaaaccccatctctactaaaaatacaaaaattagccgggcgtggtggcacatgcctatagtcccagtgcttgggaggctgaggcctgagaatcatgtgaacccaggaggtggaggttacagtgagctgagatcgtgccactgcactccagcatgggagacagagcaagactctgtctcaaaaaaacaaaacaaaacaaaaacaaaaaaatccacacacacaatgaggtacaactttacatgcccaaggatggctgtaatgaaaaaaaaacaagtgttggcaaggatataaactgacaccctcatgcactgctggtgggaatgtaaaatggtgcagctgcttcttcaaaaagttaaatatagaatatatcaccccgaggccgggcttggtggctcacgcctgtaatcccagcactttgggaggccgaggtgggcggatcccaaggtcaagagataaagaccatcctggccaatatggtgaaaccccatctctactaaaaatataaaaattagccaggcatggtggcgcacacctgtagtcccagctactcaggaggctgaggcaggagaatcacttgaacccaggaggcggaggctgcagtgagccgagatcacgccactgcactccagcctggtgacagagtgagattccatctcaaaaaaaaaaaaaaaaaaaaaaaaaaaaagaatatatcatcccaatgtccatcaacaaattaacagataacaaaatgtgatacatctacaacatagagattattcatccataagaaggaacgacatattgatatacgctactacatagaggaacctcaaaaacattaagcttagccaagtgtggtggcacctgcctgtagtcccagctactctggaggctgaggcaggaggatcacttgagaccaggaggttgaggctgcagtgagccatgagccaaggtcccaccactgcactgcagcctgggcgatagcccaagaccctgactcaaaacaaaaaatcatgttgctaagttaaagaagccagtcacaaaaggccacatatgattccatttacatgaaatgtccagagtaggtaaattcatagagacagaaagtaaactggtggttagcagacaccaggagacagggggtgctatgaattgaattgtcccccaaagttcatgtgttggaaacttgatccccaatgcagcctcatgggaggtatttgggtgaagggagcaccaccctcatgaatggattaatgacattatcacagagtgggttccttataaaaggacgagttcggccaggcgcaatggctcacgcctgtaatcccagcactttgggaggccaaggcaggtggatcacctgaggtcaggagttcaagaccagcctggccaacatggtgaaaccccatctctactaataatacaaaaattagccaagcatggtggcacacgcctgtaatcccagctactcaggaggctgaagcaggagaattccttgaaccaaggaggcagaggttgcagtgagccgagatcgcgccacggcactccagcctgggcgacagagcaagactccatctcaaaaaaaaaaaaaaacaagacaagttcagccctgtcttgttctctcttacccttcccctttcaccatgggacgtgtgacaagaagatgccaaccctgaatctcggacttccctacctccagaacggtaagaaataagtttctgttcattataaattacccagtctcgggtaatatgttatagcagcacagaatgaactaagacataggatacaaaaactgactgcttaatgggtacaaagttttattttggggtaatgaaaaggttttgaaactagatagaggtagtggttacacaacattgtgatatactaaaggccaatgaatcatacacttcaaaatggttaatctcacgttatgtaaatttcatccccgtttttttttttttaaaggataaaaactaaaaaaaacctcatctgtgttactggaggttaggagagcggtaactgcttgggaggagcacttgggagagcttccggggaccgtcttattctatttcttgaactgtacactgggattggggcgagtttattatccaggcatttatctgtggcctttcatactttggtaacaagctaagaaaagaaacctaaaagctgaacgcagtggctcacaactgtaatcccagcactttgggaggccaagacaggagactcacttgaggctaggagttcaagacccacctgggcaatatagcaagaccatatatctatgaaaaaaaaaaaaagacaaaaaacaggtagaaggaaaaatatcctcacaattgtattcctattttgcggatggggaaactgagtcacagagaggtcctattagtttgcccaaccttcccagctgttacctgggagagccagaattggaaagcacagcccacatcttgactactataccgtctgcctctaaaccggcagatggagcccagcatggggcgtggcagagggcaggtgctctgctaatggtggtgtgctgcagctgtgtcagaagtgggaccagcacatggcatgagtgactctgattagatgtgctattactacacccttggccttaagcacagcttgctgggtgagaggcagcacgtgggccaggccttgagagcactagttcaggagtcagagggcctgagtccaacctcagctctacccactccttgctgaaacctcaagcaagtcactcttcctactgaaccttagctttccagtctgtaaggtggcatgtgctccacagggcatctataaaaattcaacaaaatcaggcttgcctagagcagagacaggtgtctggcacacagtaagtgctcagtaaaccagcactgccattattttaaccaccaagggggtcggtggggtggtacaggtcccaaaacagcagtagtcagcagggcccacctcaccttgcccacctctgccagctgctactcagaaagatgggcactgggaaggcccaagagtgcaggtgtgcacaagcgtgtgtgtagggtgcaaacctgagacaggtgtgtcagagctaggccatcccagatgacagaggcaggcctgtggctgggtcatctggccccttgtaacatgaatgcggacactgaaggcccaagaggggccaagactcatttaatgccatcagtaatcctagaccagagagaaactcttgcccctccaacagttccacacccatcccaaggctctcacagtccagcctaatgagccatggcctccgcacgtgcaggccacgggacaggagcccatgaccctgtgttccccagcacaccacccacacaccacgccaaccattcattcaacaaccatttactgagtgcctactgtatgcccaccacttttagacgtgctggggataccactgtgaagaagcctcatgaaaatgcctacccttgtagagctgacaacatcagagatctggcttgttaacccactttatagatgtgaaaccaaggctcagtgaggtgacatggcttgctcacagttgcactaagaggaagcagcagaaccagggttagaaccttgatagctgccaagactcaggaagctccatcaacaaacccagactccaggctcaggctgggggactgggccaagggaccttaaaagccatctctgtccagaaagagcagcaggacacgaatctcctctgctcagtcaggtggggaggctgctcccagggaggggcgtccatccctcatcgctgctccctgtctgcgtctgcaggctggtacagtgcaggatgcgtggctcttcccgatgcctgcagcgccagcttcctgccccctctttgaacaagcccacttaccccctcaggactcattggctgtcgcctctggcataactgtgaggctcaatccccgatttccttcaggcctttattcagatgcccccttctcagcgaagccccctctggccgccctgcctgcctcatgccctcccatcctcacgttgcttgttttttctccatggctcgcgccaccgtgagacatgcatgtctgcctgggagctgtctgcctccctgtcagcgcccaagatactaacacgaggatgggatgtttgcctgtcgggctcactgctggaccccaggacctagaacagcgcctggcccacaggcgctgctcagcacgtgtttgctgaatgaatgcaagtgcacacagggcagccaaccgccacacctggggaccttctttccagggggaggcccacagaagctggcctgggacaaagccatctctcagcaggtggcgcttctccccatctgcctcccagtcttgcgtggcagccactttgggacaaacagccctggggtcaaaaagggtctcttccctgtcctaacttcactaaaaggggacctcagcttcccactagtacaaatggatcaggccacgcatcggctcacgacatcacagggctgctctcgtctggagtgccaaagccaaggtccttttccatgacctgcaggcgcgacacagctggactccgcgttgctcctctgcttgcctcccccagctcgccctagctcacactgctccagccacgctgttaccagaaaacaccaggcacatccccacctgggagcctctgtccttgctgtccctctccctgggacacccttgcccagccagcgtctcacctcctccaggctccaggcctctgaccactgccgtctcctccgggcagcctcttgatgcccccccgcccccagcccattgtccctcactcacagttcccacttttcaccccagcacttgccaccccgacattccatgtctacttatttactgcctgccccacccccactggaatgtaagctccatcaggggaccactgtgtctcggagcccggggctatccggcacagcacacagtcaatgaatacttgctaactgaatgaatgctgaatactgcctcactgtgttagttcagtgacgtgacttcccctctctgggcctcagtttcttcatctataaaatggggctatgaatgagatcactcatgcacagtcagatccctgctctcctgcccagatgaccactgaaggagtccacgaaatgggggcataagcagctgtgggcctggggctgcggaatgctggctcctcaggctggtaagaccctccgcctctgcctctcagggcacagctttccaggaggagccagcgtgggagaaagaatctggcgggcaaaagcggcctcttaccacgcttgtggagccagccttctttgatgacagacacctcattcatggtggcagcgtggtacgctgtcacctagctcgggacagctcagggcagcaggacatgcaggaggcaccgtggacagggcacagtctgcaagacaagagaggagctggtcagggcgggaggggattccacaccagccccttccctgaggacgccgggctctgaggccctctggctgttctgcccactcagcaaagggtaaggccagcaagggtggcgtggagcccgctctcaaggacccattctgagcagagagatgtggcaatgtccccagcgaccccaatctgggggaagcagagctccccggcctaagcgcaggccagaccccaaactcaggacacccatgctggggggaggtggcccctccacccacagtcactcctgactgagcaagcatcaaggtagccgtgccctgccctccccgtgtcattcccatggcccaacactgaggtaacccagtatgaatgaggcagcccagggtacctgagggaatgcgcagagccaccagcatctgcctgtccctccaccatcttacacacacacactcttttctctctctcccctctcccttctttccaaaccaggaagccaccaacctgccaccttcaacaaactaagcacactcccgtccccccatgccatcccatgccattccctgagcctcagcggcctccctccccccatcagatgacagagaaaagacaggtctcagacaatccgggatcttgaacaagaaagcaacctactgcgtatgcacggtctggggcctagaagccagtcctgggggcttgaccgaggccctgatccctaccccaagaccttcacttctgtcctcagggaccagcaaccaacagactgagggacgccgaggccactgcttcgtctcaggttcccagaacggaggggaggagggcgcgaggcagcgccagctgggcccctacctggagcctggggcctggccagggtccacagagaccaaggcgcctttgcctttcccagcctggggttatttgcggacagcaggtcgggagctacggtggcgcccagagaagtggcagctggctctagggacaccatgggcatcagctttctctcgtgccccaggggagctggtgggccggacacgctactgcctggcatgtgacagtggcaggctgcccaggtcccggcagaaagaagggaggtaagtggtaggaagcgggaggaaagacaagatggacatgacagggaagtaaacaagagggtgagaaatcacattctgggctccaagctgcaaaggcaatgatgcgaggctgggagcagcaataaggggctccccttgccagcaacatgcccggcaccccacaacccaagcacacaggactgccagactctcaatcctcagcatccccacatctcggccgggcacaatggctcatgtctgtaatcccaacactttgggaggtcaaagcaggagaatcccttgagcctaggagtttgagacctgcctgggcaacgtagtgagaacttgtctcacgacctaatttttttctacaaaaaaattaaaaattaaaaaattagccaggcatggtgctgtgcacctgtaatgtcagctattcgagacaggaggatcactcgagcctgggaggtccaggctgcagtgagccttgattgcaccactgcactccagcttaggtgacagaatgagaccctgtctcaaaaaatatataaatatgtatgtatttctgtatctcccactgttctgtgtgtcaacctctaacgtgaccatctctccccatcctgcccgcggcctggctctagtcaggtctgcccccatctgcccccacctcttccccgagttcctacgctccactcttgctccctcccactcaccccacattcagcagctagagggatccccaacgctgaacctgtctttctcctgctcagaacctttgtggctccctggtgttcccagcaaaaaagccaaactcctcagctgaggatccaaggcccttcaggacctcgcctctgctgccctgcgttccaggtgcatgagctgagacgtgcacctagaaagccctcgggaaaggctaaggaccatgacgttgactattgcacctctccagcctctccgccctacctgactctccatgttatgcttctgtcactcaagcccttccctctggcctccatcagggacagcacctccttctgggcgttcttctctctcttccttgaggtctcagctaaaccagtgcctcctccaggaagccttccccacctcagaggctgcactgtgtgctctttgtgcaccctcggagcaaccctcccaacacctattaacgctaatgcagtagaccagcaaagcgtcttatctaatgagcacatgaagaaagaggccaagtgtccccaactgacccccaccccaggaccacacacagccagggacacactaccagactctcttcatgacaccaatcttttttggggtgcatcctagaccccggatggtaccagcaacagaatgtcactaagacacagccctgccttcatgaggctcacagtctggtgtgaggggcagaaaaatacacgaatatgcaaataatcaggtggtggggaggctggagagtggaagaacaggatgttagcttggtgtgcgggacttgcgagcagacacccgagttaactgagggagtgagctgtgtaacacatgaggaaatgtatttcagcaggggaacagaaaatgcaaggacctgaggcaggagggggcctggtgaggagaaacacgagagaggtggacaggggagaacaccaagggccttctgggctatggctgggactgagagaagcccgtcccctacacggacctacaccacaccttccctgatgcaagctcagttcaaaatacttcccaaatggctgggagggagaactcagagtccaaaggaggggctgatgtggagggaatagaacaggggctccatgtctcatctcccctctcgctggcccacagcggcccagggacatcgcctctcagggcccttgtaatgcagcagcactaaagtacccactgtgggcccagggctcggcctactgcctggcgcccagtgaacagccaaacacatggctgccattattccagagagaagcaaaggcagccaggtatggccaagagtggtctgggttccagagtccaagagccaccgccagctgggtggccttgggcagggtgccggcgctcccatggagtctctcctgaatgctcccaacaccccaccagacagtcagtgaccatgcccagatgaggacagaagctgagagaagggaagctgtttacctcgggtctcccagccgagaagcagcggaggccctggccgctgctgggatcaacagagctgctttttacaagctcatctcagcaactaaggagtcagcacagctggagggagagcagggggaggagttggaagatcccctgcgtcccgcctggatcctgccctgtcctcccactgagggtggtgcctcagctgaggtgtccgtgacgcagtcctgtggtgatgaaataccagccactgcagccaagaagatggctggcttaggccgggcacggtggctcacgcctgtaatcccagcactttgggaggctgaggtgggcggatcacctgaggtcgggagttcgagaccagcctgaccaatatggagaaatcttgtctccactgaaaacagaaaattagctgggcgtggtggcacatgctacttgggaggctgaggcaggagaatcgcttgaacccgggaggtggaggttgtggagagccaagatcgcgccattgcactccagcctgggcaacaagagcgaaactacatctcaaaaaaaaaagatggcctgatcactcggggggctgccaatggaggacactcaggcagggggacagagactcgcctatggaacccccatagcacgccctgcggaggggagtccctgcacggccccaccacactcattacttcctaaggttcctgggcatgagtcttctgagtgcctgggccagagctgcagctgttgactcaagacaaggtaaaaagagcaagagcacctcacaggagaggacacccacacaaccaagaaacatacataatctcattagttacaggcaaatgcaaatcataaccacctacctgggatggctcgaattttaaaaactgacaaggccaactgctggctcggatgtagaggaaccagaacccttactcattattggtgggaggtgcaaaatggttcaactactgtggaaaactgttaagcagtcaaaatcaaagctcaatatatgcctatcccacgacctagcaattcgtctcaaggaaattagtgtatgtacaaaagacttgtactacaatgttgacagcagcaatattcacagtaaccccaaactggtaacagaccaggagtctacccacaagagaatgaataaacaaacacgtagatccacagtagaacactactcagcaacgaaaaggactaaactgctgctgaatacagcagggaaggagtgagagaatgttatagagtgaaagaagtcagcactctgcccacgcccctcctgcagcctggagccccgtgaccacctgagtcagctcccaccccttctccgctcgaaccctcccatgcaacataaaagccaaaatccccaaagcagccccaggaccctacgcggcctgcaacatccccctttgcttctctgagggcacttcacttcagcagtgcctggctccctcagctgccaggatacatggggacgccccacctcagggccttgcaggcactgcaccctcaggtggaaactcaggcccctctccactctcttcagcctctgctcacgtccctttcttgagaagccttcctaacctccctaggcaaagcatgcccaccctacctccccttacccttacccttcattttcccctaagcacccatcaccaccgatgttactgtatgtgtttgcttacgctgacagcccaccacccacactggaatgtcagcacgacaaaggcaggactcttggctgccttagccacagctggatccccagagctttgtagggtgttgggcacagagtggagtgggtacttaataagtatctgtggaatgaacatgtacagagtgaagccctgtgcccagaacaggctcaaaataagctcaattcctttccttgccacttactaagtcctttttctctcgccccctctcactgacctgattttgatgccagacagcacagatgggctagggaggcaggtggggaagcagagatctgcgtctcttggagctggagctggtgggtggggctccttcctggtgctgcggaggctcattggggaggtggcagcgaccccctcaggagcctctgtcgcctgcactcagatctgtgcctttccacagcgcccggaggaagacttgctcaggagataaattcaaagacaacaggaagctggacgtggtggctcacgcgtgtaatcccagcactttggaaggctgaggcaagaggatctcttaagaccaggagttcaagaccagccttggtaacatagcaagaccttatctctacaaaaaatataaaaattagccaggtgtggtggtgcacacctgtagtcccagctacttgggaggctgagccaggaggattgcttgagcccaggaggttgaggctgcagtgagctatgactacaccaccacactccagcctgggagacagagcaaaactgtgtctcaaaaaacagacaaacaaacaaacaaacaaacaaacaaaaaaagctggccgggcacggtggctcacacctgtaatctcagcactttgggaagccaaggcaagaggatcctctgaacccaggagtttgagaccagcctgagcaacatggtgaaaccctgtgtctgccaaaaaaaaaaaaaacatacgtacatacatacatacatatatatatatatacacacatatatatgtatatatacacgtatatatacatatatatatatatagtagtcaggtgtggtggtgtgcacctgtagtttcaggtacctgggaggctgaggtgggaggttgacctgagcctgggaggtagaggttgcagtgagctgagattgtgccactgcactccagcctgggtgacaaagccagaccctgtctcaaaaaaaaaaaaaaaaaaaccaaaaaacccaaagacaacaggaactagtggtgtaacaggcagcatctgctcatgggaactcaggagaaaggcacctggggcaagacgtgagggaaccaactccctcatctgccaccagccattcaccactctataaactggtcccagcgtcttgtgagaacattctggtaaaactcataaagtggaaaatgtacatgtgcttggaggaatttctcctgcagaaaatgctagtgccagggcacagaagttctaagctgggaattctcagcctcaacactagtgacatttggggatagagaatccctgatgtggggactcttctgcaccctgaagaggtctggcagcatcctgggtctctactcactaaagccaacagaacaccttcccctggttacgacaatcaaacatgtcttcagtcatcaccaaatgtctcctggggtacaaaaccaccaccagctgacaaccgctgtcctaagtatgtactgctgaaatagggaaacctggcaacaatctaaaagctcacaacaggggtctggtgctatatattggttaatatcatgactctactaaaaagagcaaggctcacatagcccataccacgtgccaggcccatttgagtgcttcgcacataccaatataaccctcacagcaacactttgaggcagacactcctactgtttctatgacaatgaggaaactgaggcacagaagtgaaatgacttgccctatgacttcatctcaggaagtacaggcggcctggctcccccacaacaccatgccacacagccttgagagttaggcagatctggactggggtccttgtttgcccactttctagactcccaagcctccgtttcctcctgtccttgcaaggacagacagcagcgctttcatcacaggctaatgcagggaagggctcagcacagcacccagcacgtggagacggtctggccacacaacacaacaagccatcctgagcacagaaacacagaaaccagccctgctgtgctgacactgggaccatcagcattcgctaacgaaggctcgcggcacgacagaatgcaggcgggatgccttttctgaaacgcacacacacacgccctgtcacctcaattctacaatatgcgtattgtttcacatgctgatgtcattgagattggcatgtaccttgcaatccatggacaaaactcacctatcgcattcttttcagaaaagcagttatatgatcaatgatggaccttatagggcatactgtcttagacttcagggcacggggaggtatgtgtttaaatgtcacacgcacagaaaaaagaaatccgaaggaaatacgccacactaagaggcaggagagtgggtgcgggaggcaaggcagcctcaggaaccaaatgccagcttttcagccctggctgtgtcacctgctgtgagaccttgggcaagtcaccaagtcatgttccctttcttcacctctgtttcctcatctgtatattagagataataactgcatatacctatctctaaggctattggagggttcagtgagttaatccacatgaagtcctcccaaaagagcctgtaagagcaactgctcaacacgtatcaaatattatcatcactggccaggcgcggtggctcatgactgtaatcccagcactttgggaggccgaggcgggcaaatcacaaggtcaggaggtcgagaccagcctggccaatatggtgaaactctgtctctactaaaaattcaaaaattagccgggctggtggcaggcacctgtaattccagctactcaggaggctgaggcaggagaattgcttggacccgggaggcagaggttggagtaagcagagattgcaccactgcactccagcctgagggacagagcaagactccatctcaaaaaaaaaaaaaaaattattatttcctctgatgggtggagacatgggaaacttcactttctatactgtatgtttctgaacaggtgaatttttacctattctacctccttggtgagaaggtggcactgaagaaacttttttttttttttcctgaaaaggtctgggtacttcaaaaaaaaaaaagagagagactttttgtttcttttttcttttaaacacactccctacactcgccccatctgtctgcttggagcaggtggggctggaggcaggttgaagccgtgggcaggctgcaaaagaaacggggacaagaataagcacagagcagattccttctcctccctgccaccccacacacacaccttccccctcacgccacccagggccttacagcacccacagaaatcatgtcaaatattctagtctgcttggccacgggctccatacactctgagggctccatgctgcaaccagcgggatcctccacgcagttctgaccctgtccctcccctgctcaggacctctccctagtgcccatggatcacgtccaaggcccctatggaggctgccaggggccatctgccttggccccgcctgctctccagcctcactggtctgctcgctccaacacacaatctccccttctcctggccccatgaagactccctgctctcacaccccaagacctttgcacatgctgtaccccttgcctggcactctgttcacccatcttcttcacggaggccttccctgaccacccctctcccacgagcagcggactctcagagctcagccttcccttcccctcacagcacttgcctctgtcacctgcatgactatgtgggtaatgtcgcctctcccactggactgtgggttccacaaggcagggatacagtctgtcctagcccccactgtgtccccagctccactcagcacagggatgggcccataactttcattacttcaggggggagtggtgaacagaaccacagcatttgtgccaagtgaaggtaaaacaaaaaatcctgcattcattcattccacaaatatcacaacaactctgcatcatcactgctcgggtcaccagggattcagcagtgaccaaaacagaactccctgccattggggagttgggggaatgagggaacaggcagcaaaataaaaaataaatacatacgcaaattagacaggatagccaaagctaacaaatgccatggagaaaaggagcacacggaagattcagtgcagggaaagggagcaggggtttccgactatacacaggatggtgacagaagggcgcactgaggcagcgcagtctgagcaaaaccggaagcaggtgagagagccgggggagacctggggaggaacgctgcaggcaggggaggagcagggctgaggcgcgttcgaggcgcctacaggagtgggtgaaggggagggccgggagatgtagctagaggaagctggggaccgctgggcagggccttgggggccactgtcagcattgtggctcttatttggagtgagaggggaactatccgcctgaggcgagctggggagtgggggaggggcagcaggtggaaccccttgcacccagggcagggcaggagtccttagggaggcagcccttcctctccaggagctgtccccagaataagccctgggcactggcctgatgggctcaccacctgcctcacttgagaaccatgaggacctgcatgcagcagatgtgaaaaccgaggatgggagagattcggtgaatacccacagcgagagacagcagggacacagccaaggagcccggacccctctcctccgagccctgagctgcctccacctccttctgcctttgctcccaagagacagggccacctcccatcttgtgtcgcctcctcccacaccccggccagcccttccttaccgcccctgatgtgcacgcatgcacgggagccctccagttggactgcatggggaatccctgacccacgtcgctctgcatcgccaccacctccctgggagctccagggcagggcccagtggcaaaaggagaaaccagtgggtctgcatcaaggctaatactcagtgagcactcacaaagcaccaggcatggattaatgttcatcttcacagccagcctgtgttactatccccgttcctcacatgggaaaactgaggcccagggagagagccacatgcacacagtcacagcgagtaggtgcaggagagggaccgcaaccagagcagaactagcccacagacctttccataacgacagaaatgtggttactaaatgtttgaatgatggctagtgcaactaaagaactgactttttacttttctttaattgtaattaattaaaacttaaaaagccatatgtgagtccgggcacgatgactcacgcctgtaatcccagcactttgggaggctggggggggggggggtgggcggggggcgatcacaaggtcaggagttcaagaccagcctggccaagatggtgaaaccctgtctctactaaaaatacaaaaattagccaggcgtggtggtaggcgcctgtaatcccagctactcgggaggctgaggcagagaatcgcttgaacccgggaggcggcggttgtagtgagacaagatcacaccactgcactccagcctgggtgacagagcaagactccgtctcaaaaaaaaaaaaaaaagtccatacatggctagtagctaccattctggagtgcaattctatagaattcctgctaattaagcaccgggagcttaaaggcaggaggcagggatgtgactctcacaggcccaagaggagccagatcatcccagtgcggctggaagctcccatgctataccccatctctcccgcaccccaacgcagcttacctggggaattggagcaggactcaggcccaaactcacacctctagtcaactcaaatcctgactctaccacttccaggctacacaggtcacttctctgaacctcagcttccgcatctgtaaaatggaatctttttttttttttttttttttttttttttttttttttttgagacagagtctcactctgtcgccaggctggagtgcagtagtgcgatcttggctcactgcaacctctgcttcccaggttcaagcaattctcctgtctcaacctcccgaatagctaggattataggcacccaccaccacacctggctaatttttgtatttttagtacagacagggtttcaccatcttggccaggctggtactgaactcctgacctcgtgatccaccctcctcggcctcccaaagtgctgggattacaggtgtgaaccaccgtgcccagcctgtagaatggaatcttaacaccaatctgcccaagcacatgtttatgttatctcaaaagataatttttgcaggccaggtgcagtgattcacgcctgtaatcccagcactttgggaggctgagggatgtggatcactggagcccaaaagttcaagatcagcctgagcaaaatagggagactcccatctctactgaaaattgttttaaaaaaattagccaggtatgatggtgcatgcctgtagtcccagctactcagaaggctgaggtgggaggaccacttgagccagtgaggtcaaggctgcaatcagccatgatggtgccactgcattccagcctgggtgacagagccagaccctgtctcaaaaaaataatgaaaaatttaaaaagatgatttttctgataaccatgggttgtcctggggacccaatgagatggcttcacacacagctggggacagggccagtgcttgaaaaataggtggcaattacataaaggactctgacatcaggggccgtcctgagcctgtcagagccatgcagtggcagctaatgttactgctgtcactacttggttctaaaggaatcatcccaataatttccaacatgcccctactaactttttgaaaatatcatctaaatgaaaacacacagctaaaaagagtcaatgccctgcagacacctcctcccacccgccaaggccttcggacaccagtttgagaagctgggctctagggcgccctgtctccaaagcagaatatggtctgctttctccatccctggctgccacctgaatccagccagctctctcccacacaggtccctccccacccacctgtgtcccttctctttggggataaagccctggatccccatcatagcccaggccctgagccctgccaccctgctctctccccctcacccactcccccggctccagctacatgggcctgctgttccaccagcacatccagatatcgccttccttgcggcctttacctggctgcaccccgtccagcccacttcctcgggctctcacatcacaggggctcctcagcagccttcccaagcccctctcccacccagtccagctagatctctgttccctccttcagccacaccaagcactcacaggccaatgcaacctctctgccacctccgatcgcatccagaactacacgtggcacatagaagtgattcaatcaatatttggagacagatggaacacacaaatgaccaagaacagccaaaggctggctcctgaggctgttcagcaatcaggcccctagggcagtggggagggggtgcctcccatcctcatctcttccccctgggccccccttgggaggggccaaggtcatggtattgggggtggagagaagcagccacaccccacatcccaagcaggcatggaatggagtcatttctggattactgaggcctactttgtgccagctctgtctaggagaagagaaagcagaaaagaaatcatgatgacaacagtgacaactccagtcatagcaggcagggcaagaagatgaggctgtcttcaaaaggcagcttcgccgacagagcagggttcaaccatcatgcctattactgacttccagcaaatccaataacctctctatgcccgtttcctcccctgtacaacggggacgatcgggacagcgagctgccaggctgtggtgaggatgagtgagagcagacaccttaagctctgcagcagtgcccagcactgagaggcgaactactcacgagaatgaccccaatattctatgtggcttcctgggcctcagtttcctatctacgagatgggagtgctaacactgcccacctcccaggctgctgtgcaggtttgtagagctaatatgcagcgtctggttgggcaggagtacagtggtgggagtgattcacattcctgtctggagccctcccatcagctaacaggccctaccactctctcccaaggaccaacaacgagcctgtgcccactgccctgcagagccccttctgtgctctcaggtgccctcagtcctgtctggcaatcaccaggagtagcatcagcccaaattcatcccgccgcctcctcaggaggcctgtgctttccaacgcagcagctccgtgcatcctccccaccgccccactcagcaggaaggttcccgtttacagctgagcaaaatgcaccttagggagaagaaataaggccccagagctccacagccaccgagaggggtgccaagagcagggttctcacccacgtcagctacccccgggaccaggtcactcagcagccccagctgggtaagtgtacaccaaaaacccaccagaccatgaagaacttgaagccaggctggagaagagaaccggggagcggcaactgccccagcccattcggaaagggcccacaaagtggcaaaccgaggaagacttgggtttctggcctcacccttagaaacaacatctgcgaacgagcttctccagcaggacggctgggctgaagaaactcctgctgggacctctgacatgcagtctcctcttggccgacccggcttgctgtccctcgctcggcacagtcagagcacctgggccctgctgtgggtgccgagttggcagtgggtcctgccccaagggggccaggctgagctcccacccagcgcccctcccacactcactccctccctcctggtcctgctcccaggctgtctcccccagctgggcctctcgctgcttggctggctgtccagaagagcctgccatggaaccaccccaccgtgcggcccggaggcctgtggttgagggccttccgctgagagctctgggaagctgaagagaggcccggggaggggtgaccctgggtcctccaggggcttggagctcaagtctgaaagacactcctttccatcccaacccatcccgggggccttctggagaccctagtggtttgttctgaggggttctgctccttctaggaagataccctggaacacacctcaaaaaaaaaaaaaaaagccagagcgcctgctcccgcaccaagccttaggggtgagcccatgggtgggatcagaagtcacactcaccaggggctactgagctgtggtgggggaatctctggaagcccagattcatagcctgtccccaacacttcctggttgggggactcagcacaagctacagaggctctccaggcttcagttctcaccacttgtaaagcgggaatcagagaagattcctcctgggtctaatgggtcttcacccagatcctcccatggctccctcacagcactccagtccctacccacacgtcacctcctcagggaggtcctccctgatcacccagctatagtggagaaacatgcccacactctcaacctggccctcatttattttgccttcgtaatatcaaccacacctgagcccaaccagagacctgggtgctgggcgccagtcacaagccctggtctttccaattccagaggagcactgggaatggcgcaggcctacaggcccacggcagcgtggacgcagggtcagcgggtgctgtctgtatcaggtgtgactgctgccctgcgttgctattcagtattagtccggctggttgggttggggaggaatgggcagagaaatcagcccaatgagcctcccctcctctttccctaaaagtaacagccacgggctctggagaacacggtgtgaaaaccacaggagggaggcaaccctcaggcctttgctggctgtaaggcagtgatgctactggaggggaagtgggaggcctgtgaaacgccctgctccgctcagtcaaatctacccacgcccccaggcaggagcctgtgaccggctcctgggtcacctgctaacaccctgaatctgaccaggctgttcctgctgaaattccaaactccttcacagacagtccacaaggctcccagtgaaagggccctgcctgccccgcagccccaggactcatctcctccctgctccctcgctctgccaagccacacaggcctccgtgaggcttgtccctgcacctcaccaagctctgtcctcccttcagacctttgcactgtggttccctccacctggagggctgttccttctcctcccatcccacatgactgcctcaccttgccaaactgggatcagctcagaggccctccccacagccgcatgcatctaaagaagtgcccagtctgtcacctgatttgaattcgctgcctagctcctccccctctaaccggctccttgcttattaacctgtttcgggttggtcttgcttagccccacaaggatagggactttggcaagtacactgctgtattcccagtactgatgcaacgctggcacatacgaggtgttcagtaaatggtggcggatgagtgaaaccttttcctcggctccacaatacccttaggatccatcctcacctctcacccaggcccacaggccagtgcagcacagcccctgccaacccctgcaggcacttctgctgctccccctgcccaggcccagccttcctgccactcccagagctgtgagctgtggtgggctgggaaccaggggcagtggcatgcacctacggtcccagctactcaggagactgaggcaggaggatcacttgagcccaggagttcaagactagcctgagcaacatagcgagactcccgtttccacaaaaaatttaaaaattagctaggcatggtggcatgcacctgtagtcccagctactcaagaggatgaggtggaaggatcactaaagcctaggaggtcaagcctgcagtgagctgtgatcacaccactgcactccagcctgggtgacagagggaggccctgtctcaaaagaaaaaaaaaaacaagcacagagcctgacctctgaaaagactccagtgtgtctaccttggaggcgctcagggctgcaaagccactgcgtggaagaggagtgggcccgggagctgcccttgtcagttctgacttgattgcatgtctcccccgacctctgtttctgcatctgtaaaactgagatgctaatttcagccctgatctcctcctagtgctctctgacacggttctgtgaactggcaaaggccttcaaagtcccggcagaaatactaagaattacaattgctaagacagaccaacagctcaccatgtgtcgggcactgttcttagtgaggagacatttccggtaggcttattgtatgccagaacagttatgaatgcttcccacaaattaatccactcagccttcacaataatcctatcaggtgggaattatcatcatccccatggcaccgatgatgaaatgagctcacaagggttggggagcctgctcaaggtcacacagccatggagtggcacggctggatttgaaccctgtgctctcactcgcttccatacacctctttacagaggctggaaaccagaacattgaagttctggatcctagctgggccaggctggggagctggatcccggaatgctcgaggggaccaaaagtagggggtgggggaggctggatgcctccgttccataacataatcatgactgccaaccaagacttacacagtaccaggcaccattctaggagcttctcgtggattaattcatttaatcctcacaacagcccaaggtggacgtccttctgagaccactgtatgggagtgaacagtgtggtccaaggtcgcagagctagaaccgacttcaccgtcctgctgctagctaacgcaggtccctggtagctgtgtcaccccctgcatggctctcttgctgtcttcttctcccagcacacacctgcccagggttaaaggatgccttgcctccactctgaggagggaccaagaaatgctggactggctgtaggcagagatgctcagggcagcctgaggctcaggggtaagaggaaggaaagacataggacagtcacctctataggtagaggacagaggacagaggtgactctatcctatgtctttccttcctttcacccagcctggaacctggtgagcaaggaatgcatggcactaggggctcagtgacctgggttcaaatcctaccctggcacccatagggtctgataagatgcggtggaaggcaattcttcctctgaacttcaatttcggactctgcaaaaaaggacacaaataccatataaagcccaaagcacagggctgggcagagtatatgctcacagacaaaagccactcctccagtttctccttgacaagacgatctgaggccaaggttggccaagggctcacatcacacctctcccacttcagctatgagacctctgggaaatctttgcacttcacagtgagtgaaatgattcctcatctgtaaaatggtatcacacttctaactagctcgtagctctccataaaataggcctaaccacaggtatgttttgagacttaagtgagatcacatgtacaaaagccctgtcacacgcctggcatggggtgaatgctataaacactgggcatccactagctctggaaatgatctgcctctctgagatgctgttttctcatctaaaagggagagcataacaacagcgcctaccgctctagaattcaagtattcagcaagtttatctatatgaagcattccaaacagtgtgtggcccacagaatgcactcagttactgtcagccatcaatttcatgattactgttttcactgccactgttagccccatcaggcaaaccctctaaaagctggcaggagaggaccagaggaacaaacccctagtggagaaagattctacagagtcgccgctgcctcacagactgtgggacctttctctccaggaaccacgagccacggaagccagtcagcttggaagtcactgctgcggactaggggcaaccatctgccccctctgaccacatcaccagcccaggtctgctgggtcaatcagggactgcagccagtcctctgggaactccagacccagagcaaaggctacagggcaagccaaggtcatgatctggcctagggagcagggacactggccacagacctctggggctggctgctcccagcaccagcccacagaccacaataagacaccagatccatgggggatctgactgtcccaagcccttcagagcagccttcctccctgggccaggctgggccaggggcacccccactccaagtccccttggcctatgcaaagaggaacagctgggaaaacagctcccggcctcactgcaaggccaactgttactgccttggtggggagtgtaaacatgatgtgtgaccgagctggtaactgggagacacaaacagcttcgtggccagcgacagaggagcatgtagtggtctgcgttggttcctggacccttcacatccactgccaaccaagttcagcccacgagtgaactcctgctgcttctctgggaaggtaggagtggatgaagttgaaaagcagcccattggaggctctagttactccagcccaggcgtcttgctgagccccaagaggtctccaaatgagaggaagaggtcctcacaatcccaagatcaagatgcccccagagagcttccctggggggaagaggtgttcccccaaacactccttcctcccaagttttaacaagcgggtgcaggggcacggctcctcaaatccaagcccaatccctcttcctcttcagaatgttaaggctcagacaacttcagtgacttctaacacagctttcctccctcccctatggaaggaaagaactgttactgcctggtaaataatctgagagggtaatggaatccagagcagcacctccatggtccaaagcaccccagtaaccatgacgttccctccagagtcgttaagaagttcaataaaggctgagatcagtgtaaacccccaacgccacacacgtcaaatacaggaaacagaaacccctcctcaccaatcggcatcacagtcctcccaaaatacgcccctaaaacccactagggcctgtcccgccccgtcccagtcccttaaagatcacaaacatcacagtcctctgatttgggttcccctacgttctaagcagggctcccccaacgccgtggtgatataacccagccacagttggggaagcatcctccccagaagcccccacccctgtaaatacagcacagcaacggcttccacagcgccaaaaaggtacagccctctacacttgatgcggcgcgccccctcgatagcttagcccgcgcacgccaggctcgatctgcccgccgcgcccgaaaggtccagcccccggcccgcgcacgctgcggcctgcgctccccgtcccgcaaacttgcagcgctccccccaccgcctcagtggtatggcccgccgccaccgccccggccccccgaggctggtcccaccgcccccgctcggccacccccactcagctcctgaaggaggggctcgagggccgcggtccccccgccgggcacgggtggtacagcccatcgcggcaccgcggggggcccggacgcgaccatcgtggggggggcgttcggggacacgcgctggcgcactcacctgtcaccggcagccgcccagcctctccggcggggctctacccccgcccatcgccacgctgcgctggttccctttccttgtgtttcccggcagcggcaacggcgccggcagcggcagcggcggcggcgacgcctcctccgaggcaggcccaacggctagcacggcgcggccccccccgccccctccccccagcccccgcttaccgccccctcccaccctctggacggaaataccgccctctcgcgccacaaacaggaagtgacgtacaaagagccagagacgaactctgagagagcgagagcgcaagagcagggcagagaaggaggcgggctcacagcagggcgcctgcgcacattagacaactttgggcctgtgtgggttagagatgggcctcgctaggccgtggggcggaaaggcgagatggggctacgcaggcgcactaggactccgacgtctgctttccctagggcctagccgtagtgattatttcccggcagcccctagtccgtatttacatacgctttgatcttgttttactcagttctgggttctgacgctcttaaaggaccccggagcgggagttagttaggaggggtttccttttcagtgtgctcgtcatggttgagctcaggctctgaagccacacaaccccagacttgaatttcctcctttctggtgactgtgggcagaaggcttgaccgttttctgtgcctcagtatccacatctgctaaatggaaacaatcatcgctgtgtcgctggcttttgaaccattttaatgtaaacaaaacggtttttaccaattagttcattactgcaagatattaatgccacctgctctcatcgtacatattccagtgaatctgggatataacattttataatgcaacttgggcccataaaggccttaaaatcaccctgcggccgggcgcggtggctcactcctgtaatcctagcacttggggaggccaaggcagacggatcatgaggtcaggagttcgagacagcctggccaacatagtgaaaccccgtctctactcaaaatacaaaaaaaaaaaaaaaagccgggcatgtcggtgtgtgcctgtaatcccaactacttgggaggcttgaggcaggagaatcgcgtgaacccgggaggcagaggtttcagtgagccgagatcatgccattgcactccggcccgggcgacagtgcaagtctccgtctcaaaaaaaaaaaaaaaaaagaaaagaaagaaaaaagaaaaaaaatgaccctgcaagaaaagagctttgcacagatcctaatccgtatattagctagtatactggacagctgtgagacatctggctcccagcccctcctctctcataggggattgtgctgcctcctgaatttgggttccagtatgccatataacttggcaattgtatgcattggtaagtgagaaaaatgcctgactgagagttgaatcctgggtccacctcagtctgtgagagtgtttcaggcaaatcctgctgagggttcggctttcgttttctgagacgtaaacctaatgctggaactagccctttcttatttggtttctagcttggaacttgctgcttggtattcctaattcccggtcttccccatcagtcggtgttaataactctgaccaatgcctcccccttcacagccctaaccattttcatctattactgtctggtgacaggtctgtttcccccactgcacaggaaacacagtaaaggaagagaccaagactgtctcagagatcagtgtgtatccaacattgcccagagtgggctcttgcagaatgtttgtttcaagcattagcccttctgccctaatctagactcaaggttactgtgaccaaccctcttcactcctgtccacactgaacagctcacaggccattcccctacgtctaagtctcccctgggccaacttgaatcctagcccctcctagggcacttaattatgacacactgagatctcactgaaaccacccatgtgcttgtgtataaactccttgcagcactggtagtcaagggcagtggctttctctttttttttttttttttttttgagactcactgcatcgccaggctggagtgcagtggcgagatcttggctcactgcaacctctgccctctgcctcccaggttcaagcgattctcctgcctcggcctcctgagtagctgggattacaggcacgcgccaacacgcccagctaatttttttgtatttttagtagagagggggtttcaccatgttggccaggatagtctccatctcttgacctcgtgatccacctgccttggcctcccaaagtgccgggataacaggtgtgagccactgcacccggctctttctggttttggttttttattgtttttttgagacagggtttcaccccctccgtcaccgaggttgaaatgcagtggcacaatctcagttcactgcaaccgacacctcccatgctcaagcgatcctcccacttcggcctcccaagtactgggaccacagatgtgcgccactatgcccagctaatttttttgtatttttggtagagacggagtttcgccatgttgcccagactggtctcagactcctgagctgaggcgatccacccaccttagcctcccaaagaactgggattagagatgtgagccaccgcacttggcctaatattctttttttttttttttttttttgacacagtctcactctgtctcccaggctggagtgcagtggtgccatccgccatctcggctcactgaaacctccgcctcctaggttcaagtgattctcctgcctcagcctcctgagtagagggattacaggcgtgcaccaccacacctggctaatttttgtatttttatttatttatttatttttgagtctgagttttgttcttgttgcccaggctggagtacaatagcacgatctcggctcaccacaacctccgcctcctgggttcaagcgattctcctgcctcagcctcccaagtagctggtattacaggcatgcaccaccacgcctggctaattttgtatttttagtagagatggtgtttctccatgttggtcaggctggtctcgaactcctgacctcaggtgatctgcccaccttggcctctcaaagtgctgggattacagacatgagccaccacgcccagcccttaatatactatttatttcaattccgcaaccctgctgaactgattttctggttgtgccttgtagtttgtaaaacattagtctaggaggtaaacaacactttttagcattgatgatgagtaggcccaggttctaatcgtatcttttctgtgtccttgtcaaagtcacttcacttctctgagcttgcctttctttattctattaagacagtaataatataatttatttagcaattgttacaggccaagttctgtgtaaacacactcccactgatgctatcctgttgctatctacacagtaaccctggaggttaaatgtaacagcacattaagggccttgcttgagttcccaggacaagttaaggacaaagacagtatttgaacccagacagtttgataccagagcctgtgctcttaactcaactcatgctagaaaatggaaaagtattggccctacttttgtgccctatgttacttctgcaaatggcttagttatctttggggggcctcaaaggccatcctgggcaacatagcgagactctttctctattttcagcatcaagggtgaaacttgagggccactttgaatcttgtggcagggcaacacagcgagaccctttccatttcagcatcaagggtgatcgatcgaggcgactgggcatggtggctcacacctgtaatcccagcactttgggaggcagaggcaggtggatcacctgaggtcaggagttcgagaacagcctggccaacatggtgagaccccatttctactaaaaatacaaaaatttagccgggcgtggtggcaggcgcctataatcccagccacttgggagactgaggcaggagaattccttgaacccgggaggtggaggttgcagtgagcggaggtggcaccattgcactccagccttgtcaacaagagcaaaactctatctcaaaaaaaaaaaaaaaagaaagaaaaaaagtgtgaaccagaagaaaattccctacaacctcaccccattttcttccatcttaatctagtctataaactctctccccataactataagtatggactgcacatgcactttgctgggtagagggggccggtaacttattgaaagctgttcaaaggtctcttgattcagaaaaaagaaaacgatgagggatcttgccccaagggttggagaggacatctcctcaaagcccccttctgtgcccagggagtagaaatcaggcccaggagtccattccaaggcttctcacagaggagtctccttatcgatggcaactggacaagctgtggggactagtcacaaaataatttttttttttgagatggagtctctctcagtcaccaggctggagtgcagtggtgcgatctcggctcactgcaacctccacctcctgggttcaagtgattcttctgcctcagcctcccgagtagctgggattactggcacccacaaccatgcccggctgatttttgtatttttagtagagacaaggtttcaccatgttagccaggatggtctcaatctcctgacctcgtgatccgcccacctcagcctcccaaagtgctgggattataggcgtgagccaccgtacccggccccatttttattttttatttaaaatattaggctggacacagtgtctcacacctgtaatcccagcactttgggaggccgaggcaggaggatcacttgaggccaggagttagagaccagcctggccaacatggcgaaaccccgtctctactaaaaatacaaaaattagcccgggaggtggcaggcacctgtaatcccagctactgggaggcggaggcatgagaatcacttgaacccaggaggcagaggttgcagtgagccgagactgtgccactgcactccagcctgggtgacagagcgagactctagctcaaaaaataaataaataaataaataaataaataaataaaatatttaaaagagtttcccacattataaagaaatgccaaaatcatgtatttgattcccgagccagaatctacaaagcccactccccactgcctcccccagatactaccgtgttgggaagatcctttcagagtaatgttattaatatatttggcagaagtacatataagcatcagggattccgcaaatgttggttccaatttccttttttaaaatttgtttctttttcaaaaattgtaatggaagacacagtgcacattcaattttctaatatatcggagattctcgaaacgtttaagtccaggtgcagcatctcaagcctgtaatcccagcactttgggaggccaagacaaggagatcactcaaacttaaaacttcaagaccagcctggataacatgacaaaaccccttctctaccaaaaaatacaaaaaaaaaaaaaaaattagtcgggtgcagtcgcacacacccatggtcccaactactcaaacaaaacaacaaatatttaagtggtcatgctaggctagtatactttgtgtagaccttgggatgaagctttctctgctcttttttctttctttcttttctttttcttttactttttttttttttttttttgagatggagtctcactcccgtcgcgcaggctggactgcggtggtgcgatctcagctcactgcaacctccacctccagggttcaagtgattctccttcctcagcctcccaagtggctgggattgcaggcgcccaccaccaccccaagctaatttttgtatttttagtagaggtggggttttgccatgttgtccaggctggttttgaactcctggtctcaggtgatccacccgcttcggcctcccaaagtactaggattacagacatgagccaccaagcccagcctcttttttatttattattttactactattttgagacagagtctcactctgtcttccaggctggaatgcagtggtgtgaacacactcactgcagccttgacctcctgggctcaagcaatcctcccacctcagactccagagtagttgggaccacaagcgcacaccactacgcccagctaatttttttttttttttttttgagatggagtttcgcttttgttgcccaggctggagtgcaatggtgtgatctcggctcactgcatcctccacctccaccacctgagttcaagcgattctcttgcctcagcctcccgagtagctgggattacaggcatgtgccaccatgcccggctaattttgtatttttagtggagatggggtttctccatgttggtcaggctggtcttgaactcctgaactcaggtgatccacccgcctcggcttcccaaagtcctgggattacaggcgtgggccactgcacccggcctgcccagctaatttttaaattttttagagatggggggggtctcaccatgttgcccaggctggtcttgaactcctggcctcaagcagtcctcctgcctcagcctcccaaagtgctggaattacaggcatgagccaccacacccagacttttctcctctcaataagatcaaacacctttatcaatctgcttccaacacatagatggcttccaatcccatgtggaatataaaccaaaggcctcaccgtggccttcatggctgtatatgatctgtccctgcctgtttctctaacttcatcacaaactactcttgtccctggcccatgttccagacacacatacctcctctctgcccctacaaaaagacaagcatttgggaacttgctgtctcctctggctggactcttcatgtccttgatcctgatcttggcatgactggctccttctttcttttctttcacaactctgttcaaatctcacctccgggtgcagtggctcatgcccataatcccagcactttgggaggccgaggcagctgggtcacctgaggtcaggagttccagaccagcccggccaacatggtgaaatcctgtctctacaaaaaaaaatacaaaaattagctaggcataatggtggctgcctgtaatcccagctacttgggaggctgaagtgggagaatcgcttcaacccgggaggcagaggttgcactgagctgaaatggtgccactgcattccagcctgggcaacagagcaagactccgtctcaaaaaagaaagaaacaaacaaaaaacccaaatctcacctccttgtgcactccgagtctaaaagggccatgctgtcactatgtttgtaagcatatttgaatcctctacctaggacttaacactaaaatatttttgttgtttattttgtgtcctcccccaagccagaatatacatttgctcatgaggacaaggactactgggtaccgctgtattcccagcccatggaagaatgcctgtgaaagagttcaggacacaccaccccaatatatgcccatttgatatgctgattacttcaaacagagggaactcaggggaacagtaagtgcagggactttctctgaccttcccttacctgtctgcacacggatcctccaaaaggaactccattgtcatgaatcccctccccaggaatcttctcaatcagagaagatgagctcagatcacaggagaggagaccggaggttgacgtgatgcccagactgtcacctattcttccgggaaaacttttcttaactaatagacaatctgcataacaacttttattcaccatacacctcctccctgcaccctcccataacttatgtcaccaccacctcccaaaagccccaagcccctcttcttttctgcaggtcaggatgctatatgataagcttcaatcctctgacacttctttaaatctcatattttgtgggactctcacgtctaagtatgtaattttttttttttttctcgagatggagtctcactctgttgcccaggctggagtgcagtggtgcgatctcggctcactgcaacctctgcctcccaggttcaagcaattctcctgcctcagccttccaagtagctgggattacaggtgcccaccatgccaccacgcctggccaatttttatatttttagtagagatggggtttcactattttgcccaggctagtctcaaactcctgacctcaagtgatccgcccgcctcagcctcccaaagtgctgggattacaggcatgagccaccgtgcccagcaattttttgctactttttgtttgtttttgttttgtttctgagacagagtcttgctctgttgcccaggctggagtgcaatgatgcgatcttggctcactgcaacctccgcttcccgggttcaagcgattctcctgcctcagcctcctgagtagctgggattacaggcaagtgccaccacaccaggctaatttttctatttttagtagagacggggtttcaccatgttgatgaggctggtctcaagctcctgacctcatgatctgcctgcctcggcctcccaaagtgctgggattacaggtgtgagtcaccatgctcggccttttgctactgttaatctgccttatattggtttaatgtgtaagccagccaaagaacttagaagcatagcaggaggggccgggcgcagcggctcatgcctataatcctagcattttgggaggccaaggcgggcagatcacgaggtcaggagttagtagaccagcctgattaacatggtaaaaccccgtctctattaaaaatacaaaaattagcaaagcatggtggcacatgcctgtaattccagctacttaagaggctgaggcaggagaatcgcttgaacctgtgaggcggaggttgcagtgtactgagatggcgccactgcactccagcctgggcgacagagcaataatccgtctccaaaaaaaacgggtagcgggaagccatttttcactcccttcgagtttctggtgcccaacgtggggcatctttcactttttactctaggactgcttcagcagcaggctcctgacatgcctgaccaaacactggccacagataagatttcctaccacattagccccccagatctctgcctgtagagtccagcggaagcaagataggtaagggtctctttgtctttttcccttttctaagtttggattagcaggagaaaatgtgtgcgaactagttcttgtataataactctggtttttttgtttggttatttttttttttggtggtgaggggaggtattattgttttctgattcctcccctcccagagatggtcattattttcccatgtctgtgtcttttgtgttgtgtcatacagaagagaatcatagggcaagaacacaggcctcaaagactggtgagttcacagttctctgcaaaccaatgtctgttcagactaattttgctgtgggtccccaagacaaaaaccagatgaggtgctccttgggtcttgttttatgtcctcagagcttggcttttccatcagtgagaacactctggcctctgccagctgagggtgcaagtgtcagcctgtgtcagccagccagtcaaataggctggaagcccacgatgcagtgacaagcggcattctctttgtccactcgtgccagctctcaggagagtttggtcccaataactgtcccagtccgtagggctttgttgtctcaaccttcaattggacaatgctaggaaagtccaatcccagtagtgcttgcccggtgtcacagattagcgggtcagtgagtgtcatgagacaccatttacacaaacactatccttaatgcctgtggcaacaaaggtctttgctttctttttttcttttttgagacggagtctcgccctgtcgcccaggctggagtgcagtggcttaatctcgcctcactgcaacctccgcctcctgggttcaaatgattctcctgcctcagcctcccaagtagctgggattacaggtgcctgctaccacgcccagctaatttttgtatttttagtagagacagggttttaccatgttggccaggctggtcttgaactcctcacctcgtgatccgcctgcctcagcctcccaaagtgctgggatgacaggcgtgagccaccgtgcccggcctaaacagctgtcttattggtacctatggaaagatcaagaagaaaagaggacagaaagggatataacagctagtcttagagactcctctaacaagattaaaaagcagaaatcagattactttttttgtttgtttgagactgagtctcactctgtcgcccaggctggagtgcaataacgtggtctcagctcactgcaacctccacctcccaggttcaagcgattctccctgcctcagcctcctgagtagctgacattacaggcgcccaccaccatacccggataatttttgtatttttagtagagatgaggtttcaccatgttggtcaggctggtctcaaactcctgacctcaggtgatccgcccgcctcagcctcccaaagtgctgggattacatgcatgagccaccgtgcctggcctagattatttatttacgtatttatttattgagacagggtctcgctctgtcacccaggctggagcgcagcgtcgcaatcaccactcactgcagcctctgcctcctggactcaagtgatcctcccacctcaacctcccgagtaggtgggactacaggcatgtgccaccactcctggctaatatttttagttttgtagagacagggtcttgccatgttgcccaggctgctcttaaactcctggtctcaagtgatcctcctgccctggcctcccaaagtgctgggattacaggcatgaaccaacatgcctggcccactcatgtaaattaaatacagtcacgtgtcacttaatgatgagaatatgttctgagaaattccttcattaggcaattttgtcattgtgtgaacatcagaaagtgtatttacgcaaagctagatcatatagcctactatatacctaggctataagttatagtctattgctataaacttgtactgcatgttattgtactgaatactgaaggcaattgtaacacaatgctgtttgtttgtttgtttttatttttttgagaccaagttttgctctgtcgcccaggctggagtgagtggcaccatcttggctcactgcgacctctgcctcctggattcaagcaattatcctgcctcagcatcccgagtagctgggattacaggtgcacaccaccatgcctggctaattttttgtatttttagtagagatggggtttcgccacattgaccaggctggtctcgaactcctgacctcaagcaatctgcctgcctcggcctcccaaaatgctaggatcacaggcatgagccattgtgcctggccaagtgttcgtatatctaaacatagaaaaggtacaataaaagataaaagtgggccaggcgcagtggctcacacctgtaatcccagcacttcgggaggctgagacaggtgaatcacctgaggtcaggagttcaagaccagcctggccaacatggtgaaaccccatctctactaaaaatacaaaaattagctgggcgtggtggcgggcatctgtaatcccagctacttgggaggctaaggcaagagaattgcttgaacccaggaggcagaggttgcagtgagctgagatcgcaccattgtactccagcctgggcaacagagcaagaccctgtctcaaaaaaaaaaagataaaagtggtgcacttgtagagggcatctccattataaccttatgagaccaccattatctatgtggtgcattgctcattaaacatcattatgcaggagatgactgtatgcctaaaactgctagaaatataggaagtaatccaaatgcttttcaagttcacatgacttgggtacatctttggtaaataaaactagtttaatattgttggtttaatgaaaatcagctctgtcttctgacttacaaaaaaaattaaaacaaaaacaaaacccaaaaaccttatacatggatttcacttatggtccttgcttagatgatggctgcctgacatgcatttgatgtaaaaatggtgaatagtggggacaggcacagtggctcatgcctgtaatcccagcactttgggaggccaaggtgggcagattagttgaagtcaggagtacaggaccagcctggccaacatagtgaaacccagtctctactaaaaatacaaaaaagttagccgggcgtggtggctcacgcctgtaatcccaacaccttgggaggccgaggtgagtggatcacaaggtcaggagttcaagatcagcctggccaagatggtgaaaacctgtctttactaaaaatacaaaaattagctgggcatggtggcgggcatctgtaatcccagctactctggaggctgaggcagagaattgcttgaacccaggaagcggaggttgtagtgaggcgagattgcaccactgcactccagcctgggcaacagagcgagactccgtctcggaaaaaaaaaaaaaaaaaaaaaaattagctgggcgtggtggcgggcacctgtactcccagctactcagaaggctgaggcaggagaatcgcttgaacctgagaggcggaggttgcagtgagctgagatcgtgccactgcattccaggccgagcgacagaggtgactccgtctcaaaaaaaaaaaaaaaatagccgggtttggtggtgcacacctgtaatcccagctactcgggaggctgaggcaggagaaagaatggcttgaacccagaggcagaggctgcagtgagccgagatagagtcactacactccagcttgggtgacagagtgacactctgtctcaaaaaaaaaaaaaagaatggtgactagggaaatgacttgggagagctgactttgtctaatgtctcatgaaacttccatgactaatctaagcataattgttaagaacatgtgaaataaataaatgtaagtaggatcaaagttgataaatgaacttttcaacaacaatcgtgctttatgctttaacccaggaggcggaggttgcagtgagctgagatcatgccattgctctccagcctgggctataagagtgaaacattgtctcaaaaaaaaaaaaaaaaaagaaaaaataattgtggtttataaatagctctttaaaacggtttcccaacctcactgataacaacacccttggatggcagatattaattaaatatccaggtcatttccaaataaaacaaaatactaaagcattcattgctgaacacagacacaagtttatttacctttggcttcttaaaatttatagaaagaaataatatatttgggtccataggtaaacatgtcctgtttcatactgaaaaactattctgcgagaaaacacgtttctagaaattatgtgtcttcacaaaatgttagctcatgacagttcaaaatcgcttacttcctaggtttcgctgtagagttgctaagacttaaaattctcatatataattatataactactataagtgactctgtatgcaaagtgtacaaggaaagtaagatgttagtgaggtatgaagatgtgggggggttttgttgaggaaaaataacttagtctagtttataagttgttgcagaataaaggaaggaagaaaagatacaggtaaaactgaatgcatataaaagttggaaagagagaatcttttgtggtcaaactgaccaaaattgagtgaatttattatgtcttaaaaatgagagtgaatttattatgtcttaaaaatgagccctaatatcaagggtacattgatgcaaaactagaatttggcattatcttttaaaatgcaagattttcttgtagtattgataaaaaagagtgaaagattttctttttcaccttttaagtaatctgccttaaaaaattatgtcttatcaaaataattttctctttcatgttatcttttatcaggccttcaattactttccaagaaaataaaatcctattaagagagctaatatatatatttttacaactatataactttatttgccttcaaagccttttaataattaccctggtgattatgaaatgaatattaataaatattaaatgctcattaaatacttaaatcataaaatattaaatgattataaaatgaacagttgattaaataggatcccagatcactatataattcaataatcactctggtaaccagactaattattagtgacctaaattaatagttacctgagatcctattaatcaaatttttccttttttcttttcttaatttcaaaaaatatggaaggcctcatgaatttgtgagttatccttgcacaggggccatgctaatcttctctgcatcattccaactttagtatatgtgctgccaaagcaagcactcatcaagtgttttaaatctttttttacatttttgacaaacttcctaaaatcaaattctaaattcagtcttttgaccttgaattaactttggaatttgccagttgagcccctgggaaagctcaaaagatgtgtttctcacctcgaaaaagagagacattagccaggcacggtggctcacgtctgtaatcccagtactttgggaggccgaggcaggtggatcacctgaagtcaggagtttaagaccagcctggccgacatggcgaaaccctgtctctactaaaaatacaaaaaaaattagtcaggcgtggtgacgggcacctataatcccagctactcgggaggctgaggcaggagaatcgcttgaacccagggggcggaggttgcagagagccgagatcgcaccattgcactccagcctgggtaacagagcgaaactccatctgaaaaaagagagatattagactaattaggcttatttgaaatgttaaattaaatgggaaacattgtcaaataataaatgatgctaaacgtttatatttatgaacccagggtaggaggtgatgagggtgataaaaaacatttttttaaataagttatatggccgggtgcaatggctcgtgcttgtaatcccagcactttgggaggccagggcaggtggatcacgaggtcaggagttcaagaccagcctagccaacacaatgaaaccccgtctctactaaaaatacaaaaattagctgggtgtggtggcaggcacctgtaatcccagctacttgggagggtgaggcaggagaattgcttgaacccaggaggcggaggttgcagtgagccaagatcgcaccactgcattccagcctgggcgacacagctagacaccatctcaaaaaaaaaaaagttatatttctggatatgttactgatatgaatgttctaaaaattatgagattcctagaaatctaatgttataagtcataattttgttactatgttaacatgatatatgccacagaaataaccaggtttccttgtcaattgctggttataatgaactctcatcagattttttaaccatggccattctgtcttgctcatcaatagtgttttggttcttctctaaaagcatttgcaatcagctattgccccaaattgcttcttcaagattcatggaaatgactctgacaagtagtctggaatagaaggtcctaataaacttatgattataacattggactgggtaagaatttccaaaactctagtggaaaaactggactcagaaaactgctgactcgactaggtgtggtggctcatgcctgtaatactagcactttgagaggcccaggcaggcggttcatttaaggccagaagctcgagaccagcctggccaacatagagaatcccgatctctactaaaaatacaaacaaaacaaaaaaattagttgagtgtggtggtgcacacctgtaatcccagctactccagaggctgaggcacgagaatcgcttgagcccgggaggtggaggttacactgaaccgaggcactccagcctgggtaacagagcgagactctgtctcagaaaataaaaagaaaaagaaaccctgctaacaacatcaggaagaataagaattacatgggactgagctgacagattataatttttttttaatacctacagtattatagtgccataggcatagtttgatggcaagtccctggcttcataaccttgagaggcttttatttatttatttatttatttatttatttatttatttattcttgagacagagtctcgctctgtcgcccaggctggagtgcagtggcatgatcttggctcactgcaacctccgcctcccaggttcaagagattcttcctgcctcagcctcccgagtagctgggattacaggaacccaccaccatgcccagctaatttttgtatttttggtagagacgaggtttcgccatgttggtcaggctggtctcaaactcctgacctcgtgatccacctgcctcagcctcccaaagtgctgggattgcaggtgcgagccaccgcgcctggcctgagaagctttgcctggccaacatagagaaacccatctctactgaaaatacaaaaatttgctgggcatggtggcccacgcctgcagtcccagctacttgggaggctgaggcaggagaatcactccaacctgggaggtggaggttgcagtgagccaagatcactccactgcactccagcctgggtgacagagcaagactctgtctaggaaaaaaatcttaaaaaaaaaggtccaatctgggccaggcacagtggctcatgcctgtaatccgagcactttggaaggccgaggcaggtggatcacttgaggtcaggagttggaaaacagcctggtcaacatggagaaaccccatctctactaaaaatacaaaacattagccgggcatggtggtgggcacctgtaatcccagctactcaggaggctaaggcaggagaatcgcttgaacccgggaggcagaggttgcagtgagccaagaacgtgccactgcactccagcctaggcgacagaacaagactccatctccaaaaagcaaaaaaaagaatctttacaatcaatcattattcttactgctcttacataaataatcaggccaagtttaataagagaccaaccttattttgcaacaaattgatatttttttccttgaaacagggtcttgctctattacccaggctggagtacagtggtaggatcacggctcactgcagcctccaccccccaggctcagatgatccttctgaggtcagcctcctgagtagttgggactacaggcatgcacgaacatgtctaatttttttgtatttcgtgtgccaccacgtctgatttttttgtattttttatagagatggggttttgccatgttgcccaggctggtctcctagactaaagcaatctgcttctgcctcgactcccaaagtgctgggattacaggcatgagccaccactcctggcaacaaattgatctcattgtgattgtgtctggcagaaatgggggtgactgtacaaagaaaaatcatgtttcagaagaaaactatagtgtatccattattagattctagttcattgttgtggagggtttgttatttacctggaaacttgagtggatcctgaattcttccagtttcctcaaatgtctggctatgactctccaaactaacatttccagtctttctcccttctgacttggagttactgaaagtaagacttcctttcctgaagccctgcaagctaaaactagaagacttgatagagacttcagataaatcaccacaaacacttaggtatacaccaccttcatgcctaccaatatacaaactaatcagaaagttcactgggatcacacctataatcccagcattttggaaggccggggtgggaagaccacctgaggtcaggagttcaaggccagcctgggcaacgtggtgaaaccccatacaaaaattagccgggcggggtggcgggtgcctgtaatcccagctacttgggagtctgaggcaggagaatcgcttgaacctgggaggcggaggctgcagtgagccaagattgtgccattgcactccagcctgggcaacaagaacaaaactccatctaaaaaaaaaaaacaggccaggcgcagtagctcacacctgtaatcccagcactttgggaggccgaggtggggggatcacgaggtcagaagatcgagaccatcctggctaacacggtgaaaccccatctctactaaaaatacaaaaaattagttgggcatggtggtgggcacctgtagtcccagctacttgggaggctgaggcaggagaatggcgtgaacccaggaggcggagcttgcagtgagcggagatcataccactgactccagcctgggcaacagagcgagactctcaaaaaaaaaaaggccggcacagtggctcatgcctgtaatcccagcactttgggaggccgaggcaggtggatcacaaggtcatcgagaccatcctggctaacacggtaaaaccccgtctctactaaaaatacaaaaaattagccgggcgtggtggcatgcgcctgtagtcccagctactcaggaggctgaggcaggagaatcgcttgaacctggcagacagaggttgcaatgagccgagatcgcatcactgcacttcagcctgggcgacagaacgagactttgtctgaaaaaaaaaaaaaaaaaaaaaaaaaaagttcactggaacccctaatgcaaattgcaaccaggaaaatctgtgtcaaattatcactgcctgcccctactccaactgaaaatgctttgatccagcatctagaaatcatgtcaattggctgccctccaggctcagaaactagtttacagattgctgcaaacattaaccttattcttttgtttcctcttattaaatacctgtttgcttgtgccatacagaggcctgactgtgatggcagcccacctgccacaccacctcctggaatgagacagaactgattaattggactgacctagtcccaggtctcatactattcaaacactaatctgatttttctgtcatccaccaccaaatcaacttttagcatgtggaacttctagagaagtttcagataggagaaatgaagaagttcgagaaatgccatcccaaaatacatccctttgatagactgattacttcaaatggagggaacctggggaacagcaagggcagggaggactttctttgaccttcccttatctacctaaacacggatcctccaaaaggaacttcagtgtcacgaatcccctccccaggaatcttctcaatcaggaaagatgagctcagatcacaggagatgagactggaggttggcaccacgcccagatctattcttctgggacaacttttcttaactaagagacttataatctgcataacaagacaacttttattcaccatacacttcctccctgcaccctcccataatttaggtcaccaccacctcctagaagccgcaagcccctcttttttctgtagctcaggatgctatataagcttcaatcatctggcccttctttgaatctcatatattgtggggctcctgtgcatacttacttaattaaaatgagtttttttctactgttaatctgccttatgtcaatttaatatgtagcccagtcaaagaacctagaagggtacagggaagccattttttgctcccctacaccaggcacatagttgggacttggggatcaaaaaatatttgtttaccaaatgcagttttgattaggaaggttaaagctctgtactaggctgatttttattccaggtctgaacttgtctgtttaccgagttggccaggcacggtggctcatgcctgtcatcccagcactttggaaagctgaggtgggcggatcacttgaggccaggagtttgagaccagcctgctactaaaaatacaaaaaattaggccaggcgcggtggctcatgcctgtaatcccagcactttgggaggcaaaggagagcggatcacctgagatcaggagttcgacaccagcctggccaacatagcgaaatcccatttctaccaaaaatacaaaaattagccaggcgttgtggtgggcacctgtaatcccagctaatcaggaggctgagggaggagaatcgcttgaacctgggaggcagaggtttcagtgagctaagatcgtgccactgtactccagcctgggcgacacagtcagactctgtctcaaaaaaaaaaaaaaggtagatttgaaatagaaaaatccttacaacacagcctcccacattactaagaaaaactgaaataatataaacaccacctgatctttttcaagaagagaaaaatttcacagctgcccagtggatttataaactctattcacttgccacaagatggcgccacatgagctggtcatccctgcagaaacccagctatgtcttgcaggcatcaagtcttcctagagcaatttgcgggaccattatatttgaacattcactgtctaaaaggaagctcttacacgacacctaaatgcaacatgttaagtcaccagggtgtctcggaaaagataaataaataaatgtaacatgtgatcctgaattggattccaagccaggagaaaaaacagcaataaggaacgttattgggacaattgatgaaattggaacatgaattttgcattagataaaagtatcatgtccatgttaaatttcttgttttgatagttgtactgtgcttatgaaagagaatgttcggccagacatggtgacccacgcctggaatcccagcactttgggaggctgaggcaggtggatcacctgaggtcaggagttcaaagaccagccagcccaccatggtgaaaccccatctctactaaagaatacaaaaattagccggacgtggtggtgggcgcctgtaatcccagctactggggaagctgaggcaggagaatcgcttgaacccagatgaaggaggttgcagtgagccaagatcgcaccattgcactccagcctggacgacaagagcaaaactctgtctcaaaaaaaaaaaaaaaaaaaaaaaggaaagagaatgttcttgatcttaggaactacacacaagtgtcctgaggtaaagaaagacacatgatgttctccaacctaattctcaaatggctcataacacaatagatatagatgatgcatgtatccttatggaggggagaagagggaacagtaagacaaatggaacaaattgtaaacaattggcaaatctgggtaaagagtatacagaaatcctttgtactcttgttactttttttttttttctgagaccaagtctcactctgctgcccaggctggagcgcagtggcgagatctcggcttactgcaacctccgcctcccgggttcaggcgattctcctgcctcagcctcctgagtagctgggactacaggcacccaccatcacgcccagctgatttttgtatttttaatagagacgggatttcaccatgttggtcaggctggtcttgaactcctgacctcaggtgatctgccagcctcagcctcccaaagtgctgggattacaggtgtgagccactgcatcaggcttcttgttacttttctaaaagtttacaattatactaaaataaagcattaccaaaaaagttattttatagcctgtaagaatgtcattaaaatttttttttttttttttgagacagagtcttgctgttgcccaggctggagtgcagtggtgcgatctcggctcactgcaggctccgccccccggggttcacgccattctcctgcctcagcctcctgagtagctgggactacaggcgcccgccacctagcccggctaattttttgtatttttagtagagacggggtttcaccatgttagccaggatggtcttgatctcctgacctcgtgatccgcccgcctgggcctcccaaagtgttgggattacaggcgtgagccaccgcgcccggcccttttttttttttttttttttttttttgagacgaagtcctgctctgtcacaggctacagcgcagtggtgcaatcctggctcactgcaacctctgcctccccggttcaagtgattcttgtgcctcagcctcctgagtagctgggattacaggcgcatgccaccatgcccagctaacttttgtatttaagtagactctgtgtttcaccatgttggccagactggtctcgaactcttgttttgaagtgatccacccacctctgcctcccaaagtgctgggattacaggcatgagccaccatacccgagcaggtgtgtttgtttgttgtttggagacagggtctcgttctgtcacccagactggaatgcagtggcatgagctcggctcactgcaacctctgcctcctgggctcaagggatcctcttgccttagcctccctagtagccgccatacctggctaatttttgtattttttgtagagacagggttttgccttgttgcccaggctggtattgaactcctgagctcaagcaatccacctgcctctgtctcccacagtactgggattacaggaaatttcagagataaaattaggtatcaacactgtatgccaggtactgttttaagcctttcacactaatcgactcatttaatccccaaaaccattccatgggataggtgctattattactctcatcttggtttttttggttttgtggctttttttttttgagacagtgtcttgctctatcacccaggctggagtgcagtgatgcaattttggctcactgcaactccacctcccgggttcaagcaattctcctgcctcagcctcccaagtagctgggattacagtcacccgccaccacgcccggctaattattactctcatcttagtgaagaggaaactgaagagaggttgagtaacttgtggatcacacagctgtaggatcaagctcttcataataacacacaatcaagaaggtttaaggatggccaggatatgctctactgataattcaggaccaagtactctgtaaaatgtctggagggaggaaaggcaactttatttatttatttatttatttagaaacgaagtctcactctgtcgccaggctggagtgcagtgacacaatctcggctcacagcaacctctgcctcccaggttcaagcaattgtcctgcctcagcctccagagtagctgggattacaggcgcgtgtcaccacacccggctaattttctgtatttttagtagagatggggtttcaccatgttagccaggatggtctcgctctcctgacctggtgatctgcccgcctcagcctcccaaagcgctgggattacaggtgtgagccaccacgcccagccagaaagtcaacttttttttttttttttgagacagagtcttgctctgtcacccaggctgcagtgcagtggcgcaatcttggctcactgcaacctccacctcccaggttcaagcaattctcatgcctcagcctcccaaatagctgggattacaggcgtatgccactacacctgacaaatttttgtgtttttagtaaagacaagttttcgccatgttggccaggctggtctcaaactcctcacctcaagtgatccgcccgcctcagcctcccaaagtgttgggattacaggcgtgagccaccacgcccagaatagaacattttataagaatacacaacaaaagcacagtggctcaagcctgtaatcccagcactttgggaggccaaagcaggcagatcgcttgggcccaagagtttgagactagcctgggcaacatggccagaccctgtctctacaaaaaattaaaaaattagccgggcatgtgcctatagtcccagctacttgggaggttgaagcaagaggattacctgagcccaggaggtcaaggctgcagtaagctgtgatcatgccactgcactccagcctaggcagcacagtgagaccacgtttcaaataaacaaataaataaaagtggatattgaaaatgatcaggtttgtttgaagaaaattctgatttctcctccagtgataatggctagtaggttcagctacataatcagcagccactttatttctctctctcttttttttttttttttgagacacagtctcactctgtcacccaggctggtgtacagtggctcggtctcagctcactacaacctccaactcccaggttcaagcgattctcctgcttcagcctgagtagctgggattacaggcatgcgccaccactcctggctaatttttgtatttttagtagggacggggtttctccatgttggtcaggctggtttcgaacttctgacctcaggtgatctgccggcctcagcctcccaaagtgctgggattacaggcgggagccaccgtgcctcgcctatttctctcttttattttggttaaaccttgcataattcaggactgatttttgcatcatttgagtgtcaaattgaggcaggggctcagagcacttaaacctaaattcatcataggaaagttgtcccttgaagttgcctttcctccccacgaacattttacagagtacttgctcctgggtggcagagcgaccttatctcaaaaaaaaaaaaaagaatatgcaacaaaatatgcagttactttaaaaggagctttttccaataaggacactaaataaaatatgcttaacatcattagctatcaggaaatgcaaatcaacaccacagtaagatgccatttaacacccactaggacaactataatcaaaaagtcagatactagtaagtgttggtgaggatgtggagaaaatgggaccctcatatactgctggtggaaatgtaagatcatacagctgatggaaaacagtctggcagttcttcagatggttaaaaatagaattatcatatgacccaacaattctactgctagggtatatacccaagagaattgaaaacatatgtctacacagaatacttgtacctgaatattgatagcagcattattcacaatagcccaaaagtataaacaacccaaatgtccatcaactcatagataaacaaatgtaatacatccatacaatggaatattatttagccgataaaggaatgaaactctgatacatgcctggtgacagagtgagactccatctcaaaaaaaaaaaggaatacaggccagccacggtggctcacatgtataatcccagtgctttcagaggctgaggctggaggatcacttgagcacaggagttcaagaccagcctgggctggagtgcagtggcatgatctcaggttcaagcgattctcgtgcctcagcctcccaagtacctgggatcacaggcgtgtgccaccacaccccgctaatttttgtatctttagtagagatggagtttcaccatgttggccagggtagtctcgaactcctgacctgaggtgatccgcccacctccgccttccaaaagtgctgggattaaacatgtgagccaccgcacccagccgaattgttcactttaaatgagtgaattgtctgatacatgaattatatctcagtagagctgtttttctaaaagctctttatgtactaatataaaacaatctccaaggtatattaagtgaaaaaagcaaagtgtaaaactattagatatgtaaccatctgagtaagaaaatataattatgtttgtaaatatacagatatttctgggggaactcataaaactccagtaacactgactgcctctggagaggggaactggatgactgacggatccagagtagaagcagaattgttatttttaaaataagagatgcccaaaaatacataaaaattaacacaatgaataccatgtgcctaccgcccagttttaaaaaccattacaccaggcgcagtggctcacacctataatcccagcactttggaaggccgaggtgagcggattgcttgagtccaggacttcaagaccaacgtgggcaacatagcaagcccccttctctacaaaaaaacctgcaaaaattgggccgggtgcagtggctcacgactgcaatcccagcactttgggaggccgaggcgggcggatcacctgaggttgggagtttgagaccagcctgaccaacacggagaaaccccgtctctactaaaaatacaaaaaaattagccaggcatggtggcgcatgcctgtaatctcagctacttgggaggctgaggcaggagaatcgcttgaacccgggaggcacaggttgcggtgagccaaaatcacgccattgcactccagcctgggcaacaagagcaaaactcggtctcaaaaaaaaaaaaattagccaaacgtggtggcacgcacctgtagtcccagatactcaggaggctgaggtgggaggatcacttgaccctgagaggcggagagtgcagtgagttgagatcgcaccactgcagtctagcctgggcgacagagcaagaccctgtctcaaaaaataataataataaataaaaataaaaaataaacacaaggagccccactgtcttaccccacaccttgcgctttcacaggctcacacttccttcaggtggcggagtccctcacatgatgcagtgaagggagatgtggagtcttgctgggtcgcccaggctagaatgcagtggcacaatctcggctcactgcaatgtctgcctcctgggttcaagcgactctcctgcctcagcctcctgagcagctgggactacaggcctataccatcacgcctggctacatttttgtatttttagtagagacagggtttcaccatgttggccaggctggtctggaactcctgacctcaagtgatccacctgctttggcctcccaaagtgcagggattacaggtgtgagccaccatgcccggcccaatttgcttttttcactcagtgttttagtttattcatattgatatgtgcaacattagttcattttcattgatgtacactatcccacatccaatatgtaaaacataatgcatccaacactggtgtcttattttccaacatgaccacaatgcgagttctcatcccacatgctcttcttacaaggagatgttgacttcctcttactgagaagtgggatctatcatgcctcctcctgaatctgatgggccagtgactgtggcagaagtgaagccctgtggcttccaatgctaggttagaaaaggccatacagggctgggcatggtggctcacgcctgtaatcccagcactttgggaggccgaggcggtcggatcacgaggtcgagatcgagactatcctggccaatatggtgaaaccccatctctactaaaaatacaaaaaattagccaggcatggtggcgggcgcctgtagtcccagctacttgggaggctgaggcaggagaatggcgtgaacccaggaggcggagcttgcagtgagctgagatcgcaccactgcactccagcctgggcgacagagcgagactccatctcaaaaaaaaaaaagaaaaggccatacagtttcctctggctctcaagaagctccttcttgaaacccagctgccatgctgtaaggaagcacaggccacaggaagaagtcatgtgtaggcattctggctggcagcccaagctgggccccagataagtgccagtactggttaaccaccaggtatctgaggaagttttaagacgacaccaacctcagccaacatcttactaaaatcacatgagcgcccccaagtgataacagcctaattaagtccagtcaacccctgggactataagagataataaaatgattgttaatttaagccactaagttttggggtgattagtgatgcattaggtaactggaacaactatgccacaatctgtccattctccagttgctggatatttgtttccacatttatgctattacaaacagcactgctgtgaacattctcatacatgtcttttgcatgtacgtggaagtttctccagggtatatatttgctaggagagtaactgctgggttggaaagtgtgtcaccttcaactttaccacaacctaccaaactattttccaagatggttggtaccagcttacattccatcagcaaagtatatcctcccattactccaaatcttccctaacacttgagacttaaggtttttgccagtctactgggtgcacaatggtcttatttcatatccttttaaggactggaattttgtactgttcccatgaattaatccaaaataagtgcttaaacctatagtaatgttgcttttttaaattttttattttttcgagacaggggctcactctgttgcccaggctagagtgcagtgtcgtgatcacagctcactgcagcttctacctgttgcgctcaagtgatcctcctgcctcagccacccaagcagctgggactacagccatgcgccaccacgccgagctaatttttaaattttttgtagagatggagtttcaccatgttgcccagtctggtctggaactcctgggctgaagagatctgcctgccttggcctccccaagtgttgggattacaggcatgagccaccatgcccagcccgcttttcctttttaagaatgatttacacattggggttccatattaaggcttcattttctaaaagggagttgtcactgggtatgatggctcatgcctgtaattcctacaattacaggcaagaggcaggaggatcatctgagtccaggagttcaaggctgcagtaagctacgattgtgcctctgcaatctggcctgggtgacagagcaagatcctgtctccataatcccagctactcgggaggcagaggctgcagtgagattacaccactgcactctggcctgggcaacagagggagactctgtctcaaaaaaaaaaaaggtatagaaaaaaagaagggaggctccagtagcagccaagcacatctcatgcctagatcttggtttccaccactgttctgcaattaaaaggaccaggctccttggaaaaatggttggctccaggactggggcaggaaatattcaagatgagcctgcagcatctctagagcctgaaagtaaggacacagtaaaaacaaaaacaaggctgggtgcggtggttcacgcctataatcccagcactttgggaggctgaggcgggcagatcaactgaggtcagaagttcaagaccagcctgaacaatatgatgaaaccccatctctattaaaaatacaaaaattagccaggcatcgtggcatgtgcctgtaatcccagctactcaggaggctaaggcaggagatcacttgaactcaggaggcggaggttgtggtgagctgagattgcaccattgcactccagcctgggcaacaagaacgaaactccgtctcaaaaacaaaaacaatgggagtataacaagtcaaagggactctggaaccaactgaaagagctccccatggccaaagtcagactaatgtgagtgacaaaataaagaaagtaacgttggatgataacctcaaatacaaagtaaatatccctgagtccaaactcataaaaataaatgactaagttactaaatgaggagaagagacacatttcctttgcagaagaattccaaataatttatgtaaatcccttgcccccaaggagatggagcataaaccccccaactccttacatgcaggctgtgcagtgaattccttccaaagaggacaaggtgtaaagggagaaagaagagtagctttacaaagtggagaaacttgacaaacaggtgatcaggatgaacaaaaacagtggtgaatcatgtggtcagtgtgtccccttgatatgtgatgaaatgacacttcccctttgaggtcttcctccaaaaaacacgtaactccagtgtaatcatgagaaaaatatcagacaaatcccagctgaggggcatcccataatatgtctgaccagaactcttcgaaactatcaaagtaggcatcaaaaccaaagaaagtctgagcaactgccctagccaagaggaacctaaggagacacgacaactccttacttgtcaatataaatgtctggagccagaatgttatcaaatttgataacataatgtcatatgagatcctggaacagtaaaatacattaggcaaaactaaggcaatctgaataaactatagactttagttaatactaatggatcgatattatttcattaattgtgacaaacgtaccaccccaatgtcagatgtcattaatattaggagtaactgagcgtggggtatacagcagctctctgcactatcttctcaattttttctgcaactctaaaactattctaaggccaggtgtggtggctcatgcctgtaatcccaacattttgggaggctgaggtgagtacatcgcttgagctcaggaatctgagaccagctagggcaatatagtgagacctcgtctctacaagaaaaaaaacaactggccgggcatggtggctcacgcctgtaatcccagcactttgggaggccgaagtgagcaaatcgcctgaggtcaggaattcgagaccagcctggttaacacggtgaaaccccatatctactaaaaataaaaaattagccaggcatggtggcgcatgcctgtaatcccagccactcaggaggctgaggcaggagaattgcttgaacccggcagacgcaggctacagtgagccgagatcaccccactgcactccagcctgggcgagagagtgacactccatctcaaaaaaaaaaaaaaatttaaattaaaaaattagctgagcatggtggcaggtgcccgtagccccaggtactcaggaggctgaggcaataggatcacttgagcctggtaggtggaggctacagtgagctgggatcataccactgcactccagtctgggtgacagagcaagcccctatctataaatgaataaataaagctgttctaaaaataaagtctattacaaaaaaaaaaagagagagagagagagagatttagccctgattttgcaaagggaaatgtctcctctgctgcaggaccccgacaggccttcaaagttgggtctatagttgcagcacttgccaaactaactcaggtcagatgcccaaaggaggggtggaggtggctgcagctcaactcttggctcatctcagcagcagggggcttgggcactggagaaaggggggctgaggctggcccaggccttggccacttgccacagatactgctagtttgcatctggctttagtatccactgatgtgggctaccagaggaagggatgtgtccagaggtggccttgtctcagggcgaccatccacacagaatcactctgctgggctgctgcaggtctggttctgccattcagcatgagccctgggctcgctgcaccaccatctcctcatccgtttatgggatgagaataggaagaccctgccttttatgatgttgccctcaggattcgacaagtccaacaacttagccaagcgttgatttagtacttcctggcacacaggtggtagtcaacgttagctctcagcatcccctgacccaactcctccagcggtctccagctggaagagtccaactgctcttcattcctttatgaaatggggtggtcactgtgtaaataaatcacctgaaggatgccaatcatcttggaggagaggctagttcagatctgcaacggactcatcaccagtatttgcacttaaataatgtaatgtaataatgtgttcttcgaagtcacccctgaattgatcccatgtgtaaggaaaattgttcattctaggactacttgtaatagcacgaggtaggaaacaacctgaatttccttcaaaaaggaactggttaaataaattagactactaagacacgtgtatgcttgtacatggatcctatatgctcctctgctgtgtgtgtgtgtgtgtgtgtacatctcactggaaagattacacaagaaattggttaacatttgtagtctctgaggaagggactagggggctaggagacatgggaagatacttttcactgtagagacttttgtatcttttgcattttgaaccatgtgaatgtattcttaatttttttttttcgagacaagagtcttgctctgttgcccaagtggagttgcagtggtgcgatcacagctcactgcagcttcaacctcctgggctcaagggatcctcccacctcagccttacaagtagctgggaatacaggcatgatccaccaaacgtggctgtgaatgtattatttatgctcaaaaatgcctaacagacagggcatggtggctcatgcctgtaatcccaacactttggaaagctgagatgggaggattgcttgagactagtagtttgagaccagcctgggcaacatagaaagaccctgtctctaaaaaactaaaagtaaaaagtgcttaatagaatcagtgaaaaaaaaaaatctacccctgtgggtcatggctgttggggcgggctcgggagaactgccaagtcaaatgtataacgggtgggccactgtgactctggagcagctgggaggtggaggcggcatcggctcaggtcacaaggatgtggctctcaaggcgagcagcatcctagctgcaaatgcttcctaggacaagccaataaggttggtgcggacatctacacatggacaactctagagagtccaaatccactgttttttttttgtttttttttttgagacagtctcactctgtcgcccaggctggagtgtagtggtatgatctctgctcacggcaacctccgcctcctgggttcaagtgattctcgtgtctcagcctcccaagtagctgtgattacaggcgtgcaccaacacaccggccaatttttgtatttttagtagagatggggttttgccatgttggccaggctggtcctgaactcctgacttccaagtgatccacctgcctcagcctcccaaagtgctgggattacaggcgtaagccaccatgccaggtccaaaatcactgtcttaagacctccgccttgacccttctccaaaagggctatgtttcaaatctgctatcaaggcagcccaggtggctgggtgcagtggctcatgtctgtaatcccagcactttgggaggccggtgagagaggatcacttgatcccaagagttcgagcccagcatagggtacatagtgagacctcgtctccataaaatataaaataaaataaaaatttttaaaaggcaccacagggtagggattaacgggcaaggattctgaagtctgctccctggggtcaaactcagtcctgccacccgccagctgggtgaggccttcagcagttaactcccctctctgtgcctctgtaaagcgcaacaataagagaatctccctggcacagctaaaccctgtgtggtaaattacctatatatgtttttatatcattgcagttcctattacacattgagaaattaccatggctcttaaatttagcaactggaactcttccagttcaccccagcagttgttaaaattacctatgaagtagaatcagaggaaattattaggaaacaaagaaggctgaagctcagcagggaaagtgcgcatgtgtgagctcttcctggtggcaatgacctgaaggggcggcccctggaatctgagggccagcatttgctgtcctttgaggtcaggcctcagccagtctcaggagggtctagcctgggcccccacagagaaaggcatctattactgctctctacagttgtccctcatcctgaagtccggcccttcacaccccatccccagtgcctgggacactgcatgacacacagtcagcccccaatatgacgtaactgaaaaactgaaaataatggatttaggaagatgaaagaagttctggagatggatgatggcgaagggtacacaacagtgtgaaagtacttaatgccactgaatggtacagtttaaaatagttaaaatggtccaggcgcagtggctcacacctgtaatcccagcactttgggaggctgaggcgggcggatcacctaaggtcaggagttcgagaccagcctggccaacgtggtgaaaccccatctactaaaaatatgaaaattagctgggagtggtggcaggtgcctgtaatcccagctaccagggaggctgaggcaggagaatagctggaaccctggaggtggaggtttcagtgagccaagatcatgacattgtcctccagcctgggcaacaagagcaaaactctaactcaaaaaaaaaataaacaataaaaataaaataaaatggttaaaattgtaaatttcacgaggtatattttcacacaatgaaaataaataaataaacggatgagatctagtctcatctttacctgctctctcattaattctcctccaaccccctgacctctcctaggctgtctctttttgtcagttcctgttctctaaacagggaaagggccccagattccctccaatctctatgatccctttccagctggtattaccaggcccttggctttttttttttttttttttgagatggagtctcgctcttgttgcctaggctggagtgcagtggcacgatctcagctcactgcaacctccacctcccgggttcaagcgatcctcctgcctcagcctcctaagtagccgggattacaggcacctgtcaccacacccggctaatttttgtatttttagtagagacggggtttcaccatcttggccaggctggtctcgaactcctgaccttgtgatccacccgccttggcctcccaaactgctgggattacaagcgtaagccaccacgcccagccaaggcccttggctttgattccagctgtaccctgcgcactgtcagcagccatgaacccccagcccaggtgtccgcctgagccccagcggggaccctaacaggcgcaatgcagtcagaacacagctccctcttccttgaccttcctcccgtctccccttctctgttaacagccgttcccccagatgctccggtctaacatctaggcgggccctatgattctcatcttctctagccccaacttccaacccatcagcacatcccacagctcttcctccaaagcacaccctaagcagcccaagcggccctcttccctgctccccactgccatgccctcgcagccatcctggcttcctgcctggactgctgcagtggcatccaccccagccctcccagccattccttctcctcacagaagccagagcgatgatcctaaatgaaactcagctcagcacatcccagctccaaatcctcccgatccagcactcccgggtcactgtgcacattcctcctccttgatcacaacacccccagccacctagcccctgcccacccacctctgcctcatgctggaggcagggcccaccctcacccacagccaccagccttcttcctgttccttgtcccacctcagcacctctgcccctggctgtccctctgtctgaaagctctcctcctgaacttcatgaagccacattcccaacttggcctccatgtcaccccttctgcaaggccttcctatccacaaccactgaagcggccctggccactttctcccactcctcagattccttggccagcaccaccgctttacctacaccccatccctggagaggccctgctcactacctgctaccagctcctaggacaggcctggctcaggggcgctgtgcagcagggaggggtgggcgaccaaaccagtggaaactcatggtctcacaaacggagcccatcatttggaaaggtgccagcaggcaggtgaaatccatggggggaggggatagagtgacaaaaccactacggcttattgggggcagggggcggcctaactgaatggtgactgtggccattactccccctgactcagggcttgcagcagggacatggaccatgtgtgtgcaggaagcctgacctttagagacacagcccaatcctctgccaccatccccagcccagctgcgcatagtgtgaaacagtcctgcaactcaccctgaaggagtgggggaaatgatttgaaagtcacaaaaatatattaaaacagcagctgtcttcactctaggcactggcctcccttcccagtgccccttgcccaccacccgccatacactttcagagacagatgcccagggcaggaaaacggatgcgcctcagccgcagcccagggtctggagaggtccctccagcctgggagtagagggcggctaacagtctcaacaggctcgacgccaccgccgacgagggggccgctgggaggccggaggtacaggagggtcgggcaggacgcagcggacagtcgggccttgccacggggacagaaaacagaagagaaatgaacaaagtgaagacagggagagagagaagtcacagcagtggggggaggcgcagaggagtgagggaggtcagtggggagtgggggaagggaggcccaccaggtgacacccacttagttgagggggacagggaggctgatgagctggggtctgaggcagcagaccctgctcaggggaagaaggggaatgtaggagaggaagaagccccctggcacttgggagaggtagaaaagtgggttctgccaaggccacagccagagaagaaagcacagaggacatgagagaaggggagtcctggagcaggccaggccagctgcgacgaccatcccaggctaggagaaatggggtgatcccccgaatgctcgggcctagctctagagcccgagggagacaagctgtgtcatccaggagctggtgggaggcgtgatgaagccaggagcctggggcggccagggcagatgcccgcaggctctgctgcctgcaccccgcccacaggtgggctagaaggtcctgcggcccagtcttttgaacacgctcacagtgcccgcgtggtccatctgggcaccaaggccctcgctggagctgctcccccggggccccaccagagtcctcttaatggtgaccttgacctcggctgaggacttactcttggtgctggtgacctggctgtcctgggcctcgggcacaagggcagctgcgcccagtctcttgatgatgctgactttagacaaggactccggcttcctctcaagcccagaccgtgaggaaagcgccaggcgccgcagtgtcggggcagcagccgttgtcgctgagcttgtggccttggctttgacagtcagtgctggctggggactggccttggctgggccccgtcctagcttcttcaggaccccggcatactgcaagacagagctgctgctgtcattgtcgctgtcccaagccagatcctcgtccgtttctggggtggcccccaggcggctgaagactcctgtgggctgtggaggtcagagacaggatgaatgagtcactgagtcactcaacacacattcatggagagctgcttcctctgtgcctggcctcctgggactcacagttgggagaaacacccatcactgacaccccagatagtggcgagagccatgatgggggagtccaggggactggaggagcccagaggaagtacctgaccttcctagaagttcagggagggcgccctgagaggggggacatctgagctggaagtaggtctaagaaagagggaagaggacgggagtgccgcacaaagggaatgtcatttgcaaggtcaataggtgggcatgagtggagtggagagattaatctggtcattcactccacgaatattttgagtcccaattctatattgtacctggtcctaggccggcagtgctagggacacagtgatgaccaagacagcctcagcgctgcccgcatggggctcacagtccagtggggaagacaggcttggcatcagaaatgacacaaataattctgcaagaatgacagtaacgcattctagacggagaaggacagctggagggcagaagacaggggtggctcctcatcagtccagaggaactttccctgaggcaccaactttgaagccaggccctccaagatgaattagcaaagaaaagagtatgtgctatgccctgaaggcaggaagtataatcctatgtattgagcactcgctatgcgcccagctcttcatagggctggaacttccagccacatgatcccgagtgttcccatcctcctcatggtaagattcttggaagtgagcaagcccgagttgctgcaccctgcagagcaggacactggcaggcaggaaacgcagctgggaggctctgcaatagttcaccaacaggcgccgcacaccccagcaccatgcggggatgatcttaactctacagccatccttggaggtgggtctatacagatgaggaggctgaagtacaaaggacttaagtgacatggccaaagccacgcagtcaggcccctgtgggcttcagggtgtactctgagctacacaccaggcctggggcctgtgggactgcgggccgcggcaggaagtacaggctgcatcatgggcacagtgaagagcctctgcagggcttccagtgaggggacgggccctgtcctgtgggccgcacacactgctgctgtggggataggggctggggtccatggtaactgtgcgagaccattcaggaggctatcatcctatcctgacagggagaggtggcagaggagggagagacagtagagtcatcagacccactgacagactgcaatggggagggcaggcagccctcagatgggggcccaggagagggctgacttggggaaagacactaagaccagttggggacatggtgggtgggaggcatccaggagtactggacccccagggctggaaactgggagagaagccagggcagaagacagatgggaaagccgccagtgcaaagccaggaactgaggctggaaaggcaggttagacggccctgggccgagtgaggttgagatgtgttaaagagtcaggagcaccgctcagggaagacaacagctcgcacgcccagaatcgctcccccatccccactcactttactccctgtcgtggtgtctgccttggtctcggcgccgaggcggtcaaacacagacgtcctatggagacctgggagggaagtgaagccatcagggagaggccccggtgggccaggcctaggctgagctctgtacagacaccaaggcagcccagacaccagtagctctgggacaggcagggccagactgtgctgagttgggtgttatgtctacactgttggctcacactgaccctaacccacccctatctggctagagccaaatgtgggaaagaccagctacaagtggcagattccctacacctcagcactagctcatgaactgtgtgcacgggaagagttcttagtgcctgcatgttcctttcacttcttggggtcagggacctctgagagaatctgatgagtggtagtgcatcctcccctaaattataacctaatagccatcaatagaatggttactaaattatggtatatgaatactctggaaataataaacaaccattgaaaaaagaatgaagaagatctacctgcattaatatgagaagatctcaacaaaaaatttatggaacatgggccaggcatggcagggtgtacctgtaatccctttgggaggctgaggcaggtggatcacctgagcccaggagtttgggaacaacctgggtaatatagtgagaccccatgtctaaatatatatatatgaacaaaaaagttatagaacatgccaagagtggtgactcatgtctgtaatcccaacatggtgggaggtggtggtgggcagatcgcatgagcctaagagttagaaaccagaatttaaaaattagctgggcgtggtggcccacatctatagtccctgctactggggaggtaaggtaggaacccaggaggtcgaggctgcagtgagccgtgttcgtaccacagcactccagcccaggcaacagagcaagactctgtctcaaaaaaaaaaaaagaaaagaaaagttaggtccaggcatggtggctcacgcctgtaatcccagcactttgagaggccaaggcaggtggatcacccgaggtcaggagtttgagaccagcctggccaacatgatgaaaccccgtctctactaaaaatataaaaattagctgggcacggtggcgtgcacctgtaatcccagatgcttgggagactgaggcaggagaatcacttgaactcaggaagcggaagttgcagtgagccaagattgtgccactgcactccagcctgcgtaacagagcaagactccgtttcaaaaaaaaaaaaaagttatagaacaatacttacattttaaacacaaatactatttgtgtttaaaaaagaaaaactaggctgagtgtggtggctcatacctgtaatcctagcaatttggaaaggtgaagcaggcagatcacttgagctcaggagtttgagaccagcctgggcaacatggcaaaaccccctctctacaaaaaatacaaaaattaggtgggcatggtggcatgagcctgtagtcccagctactcgggaggctgaggcaggactgcttgaacctgggaggtcgaggagactgcagtgagttgacaaggtgccactgaaccccagcctgggtgatgaagtgagaccctatcacaaaaaaataaaaattaaaactaaaaaacaaaaaactgcctatatatgtgttatgtatgtacctagatgctggtctggaaaggttaacaagagacggggatatgggagtgagggaaaagagtttgtttttactgaatatgtttctgtatcatctgaaagtgctggagttacaggcatgggccaccgcgcccagcctttttaatagagataggggctcactatgttgcacgcttgaactcctaggctcaagcaatcttcccacctcagactcccaaagtgctggaattacaggtgtgcgtcaccacacccgaccaagagatcatctctgtactccaagtcagaaggcctagctttggactatatctccactcgtctcctctggttcatattaacggtgccactttggggtatttgcccttggccaagcacagccactcattttacagcaggccatcactctatcgttgctcctgccccttggggaagaggtgccaaggggcccagctacactaactgcaggatcagagggcagaggtgatgtatttccctcctctgcagccaccatcactgtccccttggcctacggctcctgcatccccgttagaacctgcttctcagccaccgtctgtaggatatgacgggccctgtgtgatgcagagggagggacatggaccccgcagggaagcatgcccctgatgggccagtaccttttgcagcctgctgctgctccaggatcttgcgggtgcggggtgtggtgcctttgggcatgttgatgacgtacttcccctccatctcagcagtgacccggcgccgcttggcaggaacagccaggctctcctcctcccggcgggccagggctgctgggggaagaaagcaggggtatcagcactctctgagacagaacgttctcccaggatggaagctggacactaggtgtcctttatctccacacattcatgactggaatcccttaccttcccaaccacccacatcaccactgaccgaaccacagagaaactcaggtctctgttacacgaggtcacagaaggtgctcagaatccccaggctgtggcaggcctcccaggctttctgtggctctgtccctattccaagcaggcttctggcccagcccagcccacatcccctcggatggggaacctgctgggtggtggaaaggttctagagctccaagcaggcagtgctttatggctgcactcacttgtcaacaagcacttgagctgtgtacacttatgagtggtggattgtgcataagttacacctcaatttaaaaaatgaatcccctcaaacgtgttaagggttaaaagagccagttgctcccaggctcgccatcttcgcaatactttgttacactgattttaacttttttttttttttttttttttgagactgagtttttgttcttgttgcccagtctggagtgcaatggcacgatctcagctcactacaacctctgcctcctaggttcaatcgattctcctgcctcagcctcccaagtagctgggattacaggcatgcgccaccacgcccagctaatttttgtatttttggtagacatggggtttcaccatgttggtcaggctgctcttgaactcctgacctcaggtgatccgcccacctcggcctcccaaagttctgggattacaggtgtgagccaccccgcccagcctttttttttttttttttaaatgtagagacagggtttcatcatcttgtgcaggttggtcttgagctcctgggctcaagtgatcctcctgcctcagcctcccaaagtgctgggattataggcgtgagccaccatgcccagcctgattttaacttttttgcttgtggcacacaaatcaaaggccagaagagggtgaggcacttccaaacctgcaggacaaaggggagactttgtgatggaggtggacggggcgtgataggagtgggtgtcagaaacatgaagcgccctgggcctcagtttccacatttgccttatgacaccatgaggtcattgctgtggggatgggtccagcaaaggcttaagagcatggtggacgggaaggcctgggagcccagtgactgcaggcccattcccagctctcaagctgagacctggaggaggacagaggccaacatggagcagtctgggaaggaagagtgctcaggccaaggggtcaccaggagcaaaggccccatgatgggaaggaggctggaggggagcaagcgagcatgcaaagtggggcgatgcaagagatgaatctacatgatgcagggccctacagaccatgtggggaagatggcctttattactggaataatggggagccccggagagttacagcccagggggttacaggatcagactgaaggttttcaaggatggatcccttggctgctaagaggaggcaagaggttcttaacctatgaccccaggcatcaagcacagagctgtgcacaagtagggggctcggtgaagacctgttcacaaagcgtgaacccctgagtgagaaggcaatgcacacatgcctcaacacaccaactcaggtgcttctgtccatcctcctgggtggggtatcgccaccccccatgctacagatgaagaaagtgaggcccacagacgtatggcaccttgaccaagtttacagaggtgattcaggttcaaatgttttgtataccttgtggccttcaaagcaccttacaatattggaagcatgacccccaacacctcctaccaacccacgttcccctccagctcctcctaccacctgcccatgttccctcaccagtggccttggcactctttgctgccatcttgttggacacagtgaccgagatcttggaggtgctggtgtccgggcgcctggggggtgtgctgggtggagagtcatggttcaggctgttggtgatcattcgggaggcagctgtggggagaaaaggagagtccggtcgggtggggtcctggaagacaggcctcaatccagcagtctcagggtcaggatggagaaggtgaggcttgagactgaatgagaaggtcagcgggtatcaccctgtaactgcatggtactcgtgatggggatgcttgggggcagggtgggctgcatctccccaggaactagcccatccctccctatcctgggagcctttcctgaggctctagaccacactagttctgatcacacctcacccatcagtcacccagcctcgtgctgagttcgcttcgcccctcccggagctgcttcagccatgctggtctccaggatcttcctcacctagcaagtaggcgcttcctcagggtccctgctgttccttctgcctggcatgcagttccccaagcacagcggaattgctgcgtctcatcattcaggcctcctctctgatggcaactcctcagagaaaacttccctgaccaccccatcaaaaacagcacctcctcaacctctatcacccttacccactttcattttcttcacagcccttacaactgcttgacattaaactctatttgtttactggtaaactcactcacaagaacataagctccacgaggaggctgtgtctgtttactgctgtatcccagtgcctaaagtggtttctgaggacaggcacaagggcgcatgcctgtaatccctgcactttgggaggcctagggggatggatcacttgaacccagttcaagaccagcctgggcaacatggcaaaatcccatctctaccaaaaatacaaaaaatcagccaggcatggtggcatgtgcctgtagtcccagatactcaggaggctgaggcaagagaatcacttgagcccaggaggtcaaggctgcagtgagctgtgatcgcactactgcactccagcctgggcaacagagtgaaacccagtctcaaaaacaggggggaaaaagaaagaaaactacattaaaccatcacagaacatttaataaaacgtgacccccaagcacccagcacccaggcatcatgacattattggtacccagaagtcccaggacagatccttccctatcagacctcctccctctctgcaggaagaaattcttggttttcaggcctgctctctctcctctgttaataatataccccagcacttcttcagacatttttcaggttggatgggtggctttatgtctaatggctgcaaactctctggctatgcagaatctgtcctgtgagagcctccattcacaatactctttacctagctgagtgcaataggatcaggattttctgctataaaaggcaagctgttaagagggccctacctgtcctgctgtacccagagggaaatctgcagctgaaaagatgtcaggaatgtgatgctttattgtcatgacaggcaagccccatttgggtggcggttaagcaaccaactctgtctttactctgtcttgcatttgcgttgcagtcaggatatcagaatacaaagaactgttctctttcccactcctgacagacacatcattcaatgttctaaagtgtgtaaaagtgatcatctcaggaatgtttttagagcattcttcccacccctttctttctttgcctgtttccccttctctttttatttatttattttcatttactttccctttcttttttttcttttttttttgagacagagtctcgctctgtcgcccaggctggagtgcagtggcgcgatcttgactcactgcaagctctgcctcccaggttcacaccattctcgtgcctcagcctcccgagtagctgggactacaggcgcccatcaccatgcccggctaatttttttgtgtatttttagtagagatggggtttcaccatgttagccaggatggtctcgatctctcgaggtctgacctcatgatctgcccaccttggcctcccaaaatgctgggattacaggcgtgagccaccatacccggccctcttttttttttttttttttttttttgagacagggtcccactctgttgcccacgatgatggagtacagtggtgccatcataactcactgcagcctcaaagtcctgggctcaagcaatcctcccacctcagcctcccaagcctcccacagctaatttactaatttttgtagagacagggtctcactatgttgcccaggctggtctcaaatgcctagcatcaagtgatcttcccacctgggcctcccaaagtgctgggattaaaggcatgggccaccatacccagctgaacatttcatttataaagatttgaaagactggtaaaactaatgtgtgctgttagcaatcagggtagtgggtaccctggagacaatgtggtggctgggagggggcacagggggattctggcaggctggtcatgtttccattactggatttgggtgctggctacatgggtgtcccatctgtgaatggcaccccactgtaatattatgggtgaatgcttttctgaatgtatgttatggaggagtgttgcagaaacgaaccctaatttgctcagcttctttgcatccacatctttgggtaggccctacccacaatgactgtggacttagccatgtaacttgctttggccaacaggacaagagcaaatgttgtgcaagcagtggcttaagaggtgctttgcacactggggccagccctcttctgctgcttttaggaaccctgcaaccaccactgtgaacaagcccaggctagccagctagataattatggacacgtagccaagtcaccctgtgggcccagataacatcaggacaaccatcagatatgtgaatgcggccgtcaacccggcttcaacctagctgccaggtgaccactaaaatcagctgagctggcctagagcagaactgaccagccaacccacaaaatcatgagaaataaacacccatgttttagcaagacatggtggcttgtgcttgtaatcccagctattcaggaggctgaggcaggaggatcacttgagcccaggactttgaggctacagtgagctatgactgcaccactacactccagcctgggcaacagagtgagactcccatctcaaaaaataaaaatacatgtctgtgttttaaagcacagttttgggcggcttagttatcagcaaagggaagctaatgtgtatattaaaattttaaagtttatttttaaaaaaggtatctgtcgggtgcggtggctaatggctgtaatcccaacactttggggggccaaggtgggtggatcacctacagtcaggagctcgagaccagcctggccaacatggtaaaacctcatctctactaaaaataacaaaaattggctgggcatggtggcaggcacctgtaatgccagcaactcaggaggctgaggcaggagaatcgcttgaacccaggaggtggaggttgcagtgagccaagatcatgccattgcactccagcctgagccacaaaagcgaaactccatctcaaaaaaaaaaaaaaatggtatcatactgcttttaaaaaccaaaaatagccaggtgcagtggctcatgcctgcactttgggaggctgaggcaggtggatcgtttgaagtcaagagttcaagactagcctggcaaatgtggcaaaactctgtctctactaaaaatacaaaaattggctgggcatggtggcacacacatgtaatcccagatacttgggtgactgaggcacaagaatcacttaacctgggaggcagagtttgcagttagctaagcgtgccatcgcactccaacgtaggcaacacagcgagactatctcaagggaaaaaaaaaaaggtcaggtgcagtggtggctcacgcctataaccccagcactttgggaggctgaggcgggtggatcacctgaggtgttcaaaaccagcctggccaacagggtgaaattctgtctactaaaaatacaaaaattagccaggcgtggtggcaggcacctgtaatcccagctactcgggaggctgaggcaggagaactgcttgaacccgggaggcggaggttgcactgagccaaggtcgcgccactgtactccagcctgggcaacagagggagactccatctcaaaaaaaaaaaagaaaaagaaaaaatataaatacagtcaatactcatcattcatagattccatatttgcaaacttgcctactcattcaaatgtatttgtaaccccaaaatcaatacagcagtgctttcactgtcattcacagacacacacagagaacattttgagttgctccagacacgttcccaaatgaggacaaagaaggcattctcaccctcttatttcaggtcccgctctgtaaacaagcatcctttgcccagtctacttgatgtcatgaatgtgaacatttttcacatttttgttggtgattttgctgtttaaaatagccccctggacgggagcagtggctcacgcctataatcccagcactttgggaggccgaagcaggcagatcacttgaagtcaggagttcgagaccagcctggccaagatggtgaaaccccgtctctactaaaaatacaaaaattagccgggtgtggtgacaggtgcctgtaatcccagctacttaggaggctgaggcaggaggatcgcttgaacccgggaggtggaggttgcagtgagctgagatcgtgccactgtactccagcctgggcaacagagactccatctcaaaataaataaataaataagaaaataaataaataaataaataaataaataaataaaatggccctcaaagcacagtgttgaagtgctgtctggcttcctaaatgtaagaagggtatgatgtacctgatcaaaaaaatgtgtgtgtgagataagcattgtgcaggaatgagttacagtgttgttggctatgagttcccggttaatgaaatcaacattatgtattaactacagtgcctttaaaaggagacacacataaaataaagctatatatttgacgacaggcttgcaggaacctaacctagtatttcccataggagcaacggattctccattgctctgtatttcttctaggagctaagaattcactaagtgtacatattaactttacagaacttaatgaccacagatgacaattgactgtgtgtacagccattcactacccagtttattttttcccctaaaagaagagtaagaattcctccaatggctttgtttctacctttgaaaattacaggcggggatgggatggccagacgtgtccccttcactgacagggtataaaaatcaaggaaaagaggcctgaatagttaggactcaccactggtgccacggcgaatttcgcctgcaagggggctagggctgcagggtactgactcagtggcagctttgcacatgtcctgtgaaaaaagaacaggcacctgggtcaccacagaagaatcatgcatcaacctagagatctaagcaacaccacaaggatcaacacctgactgctagagaagattctaacacatttcactcctaaccataagaaagcatcagatacctccaaactgagggacactctataaaatatctgaccagtatattcagatatatatatctgaagttcagcctcctcacctattgaaaaaataggccaggtgcggtggttcacgcctgtaatcccagcacttcgggaggccgaagcgggtggatcacctgaggtcaggagtttgagaccagcctggccaacacagtgggacgcttatctctagaaaaaattaaaaaactagccaagcatggtgtcacacacctgtagtcccaattattcaggggctgaggtggtaggattgcttgagcccaggagtttgaggctgcagtaagctgtgattgtaccactgcattctagcctgggcaacagagtgagaccctgtctccaaaataggtgaaagatggccaggtacggtggctcacacctgtaatcccagccctttgagaggccggggcaggtggatcacctgaggccaggagttcaagaccaccctgggcaacatggcaaaaccccatctctactaaaattataaaaactagctgggcatggtggcgcacgcctgtaatcccaatcactcgggtggctgaggtacgagaatctcttgaacttgggaggtggagactgcagtgagccaagacagcaccactacactccagcctggcaacagggcaggattctgtctcaattaaataaaataaagaggccaggcacaggggcacatgcctgtaatcccagctactcaggaggctgaggtaggagaatcacttgcacctgggaggcagaggttgcagtgagccgagatagtgctactgcactccagcctgggcgatggagtgagaccctgtctcaaaaataaataataaacaagtgaagaaaggaaggaaggaaggggggtagggagggagggagggaggaaggaaggaagggagaaagggaaggagggagggagggaaggaggaagggaaggagggaaggagggagggagggagggagggaggaagggagggagggagacagtgcctggcaggccacagcaagtgcttggtaagtgttagctattatattaatcacttaatgagtacagcactccaggtctggtgctcaaggccacatatactatctggtaggtggccacagccacactagcatcagggctgtgtgagaagcccatttcaaagagatccaggaaggtgggtcactataagtggaggggtcaagactggaatgtccaggttgtgagccaggttgccatctgggtcccacataggaagctgctgtcctggagataatacttatcacaaggaaaatgtgaagcagcaataatagttattacagagggacccaaatacaggcagtttccactgtgctagtgcttcacatagcttaatactcacaaccagggctgggagcagcagctcatgcctgaaatcccagtattttgggagaccgaggcaggaggatggcctgagcccaggagttcgacaccagcttgggcaacatggcgagacaccgtctcaaaaaaatatatacaaccaccattcaagattttttttttttttttttcttgagagagtctcgctctgtcgcccaggctggagtgcagtggtgcgatctcggctcactgcaagctccgccacccacgttcacgtcattctcctgcctcagcctcccaagtagctgggactacaggtgcccgccaccacgctcggctaattttttgtatttttagtacagacggggtttcaccgtgttagccaggatggtctcaatctcctgacttcgtgatccgaccacctcggcctcccaaagtgctgagattacaggcgtgagccaccgcacccggccaggtttgcctctctttcacagatgcagaaaatacagctcagagaggttgggcaatgtgcccagcgtcacacagcaaatggctgaaccagccctggaacctgggtcggcctgcctctgctgccaggcctcccattggctctgcaactgaccctccacctccatgccaaacccagagacagaggggctgggcacagcacccacctgacggtgcaccactttggcatgcttgagaatggcgatgatgtcacccaccacggtcacgcccagctcattcattatctccttattgagatccagcagcatgctcttctgaatcctgcagggaaaggtcagtggtgaggccccaggtgggccagagtgggtgggccagccagctccccaccaccccatccccaagttcagcctcctcacctattatccacaaacatcacggcataattgacggcaggtcctggaggaatgccggcttccttaaagaactggatccactcggaagtggctgtggggttggacagggctcattactcacactgtcctctttagagaatagcattagcaaaaccacaatcacagcagctcccacaaattaaatgctcatcatatgccaggccctgcatggagtgctccacacacacatgatggaactgagccttcctgaccctgtgagttaagcagtattaagattcgcctgagttgccgatgaggaaaatgagatagggaaaggttgggcaacccaccccaagccacaatgctaaacaaggggcagagctcccaaacctttaccacagcctttctccttacagctccaccccgccccagtgcttgctctctgcatcactacacatgctgggcccatgactgatttagggtaactgggactctgggttctctgccctagtccccatcagccagcctaggcccagaggatgataggatcctcaggtggctggaaagaagcatcatagagccagcccatgagccttggcaagcccccacccgccacaatagcaaacctccctcagagagaggcatggaagttactaacatgggcttcggagcttgggtttgaatcctaaccctgcgatttccctatggagggactttgggtaagttaactcttggtgccttggtttcctcatctgtaaacctgggataacagatctgacaagtgtttacccagcatttggcaaaggacaggtcctgtcctacacacgggggataccacaaggcacaagatgaagtcccagcccttgtggagctgagattttagtgataacagccccaatgtccttgagtcactgtgcagactcaatgagaacctccatataaaaggctttaaatgatgcttgacccagaggacatcctcaaaccatgacagcaattattattattattattattattattattattactattactcccatcaccactaaacatagagccacagccaagaccaggcagaccccacctatgaaactttattctttctaaattttcttggcttcttggtgggtgtgaccctcaaactgaccccaacctgccaggccaggtgatagctaagatcactgattcgaagtagaactttttttcacattttgacatctctgaaactaggatctacttcatgactgacagtgtgccatagtttaattagcaaactgtttttctttctcagtacatccaataatccatgctattttagattagaagaaatctgttattacctcacccatttttcttttaagacaatagagactcagagcagggaaacagacacacaggtgttacacgagtggcagtgcggggctcaggtgaaactccatgggccacatctccaagaaggcccctgcccagccagccacaggccggttacccagggtgctgactggcccttggggactgaggctggcgaggagctcatgtccttaggatttcctccgccaggccagaggaaaggggtaccatttccctatgttgtgcaggcaccatccacctgctaagccatagggccctgggtcccactgaccagaagcaggcacctctaactatcaacaagcaccacataatgattccatgtatatgaagtgtctagaacaggcaaatctaaagagaaagtagattagtggttgctagggggacaggggaagtgactgttaatgggtatggggttttaatttttttgagacagggtctccctctgtcgcctaggccagagtgcagtggcgcaatcatagctcactgccgtctcaacctcctgggctcaagcgatcttcccacctcagcttctcaagtagttaaactacaggcgcatgccaccaggccaggctaattttttgtatatatatacatatatatacacacacacacacacacacacacaaatatatatatatacacatatatatacacaaatatatatatacacaaatatatatatacacacacacacacaaatacatatatatatatacacatatatatatatttctttttagatggagtctcattctgtcacccagactggagtgcagtggcgcaatctcggctgactgcaacctccacctccgggttcaagcaattctcctgcctcagcctcctgagtagctaggattacagccacgcgccaccatgaacagctaatttttgtatttttagtagagacggggtttcaccatgttggtcaggctggtctcaaactcctgaccgtgtgatccacatgccctggcctcccaaagtgatgagattacaggcgtgagccaccgcccccggcatttttttgtattttttatagagacagagttttgccatgttgcctaggctggtctcaaactcctggactcaagcgatccacctgcctcggcctcccaaagtgctgggattacaggcatgcaccataacaccctgctaaggtatggggtttcaagagagagtgataaagatgttttaaaattgattatggtgatggctgcacaactctgtgaacagataatataaaaaccatcgaattatacaccttaactaggtaaaatgtatgataaatgcattatagctacactaagctgttattaaggggagaaaaaagtaccacgtaggttgggggtagctctctgagccaaagcctatgattgattaattgactgattgactttaaggctagtcaagtgaagcagtaggaagggagaaggaacaaagaaatctgtaactggttgtgatcaattagttgtaaagaccaatcagttcctagggaccaggcaaagcctgtgaatttaaccaagagattactgaaacccagtgtttgaggaattgaaagagtccccacattaagcacacaccatcatttcatgtattgctaaggaaggaaaatatgcagccaattaaactgtcataaggcactggctgtaagatatacccctacttcagaaatattaagttgtgcaatgatgtgagtcttggaatcgatgagatgtggcttgttgcacacaccaggagacacgtacaagaatattcatagcagtttgtctgtgatagctccaacccagtaataatgcaatatccattgacagcagcattgataaacacacggtggtcactctcaaggtgaaatactatacagcagtgaaaagaaagtcaacatagatgacccttagacattatgttgagcaaaagaagccagatacaaaagaacacaaggtatgatttcattcatataaattcaaaaccaaagtctatagaataggaatgtcccactggtaatacaactataaagaaaagcaaggaaggccaggagcggtggcttacacctgtaatcccagcactttgggaggccgagatggacggatcacctgaggtcaggagttcaagaccagcctgaccaacatagaaaaaccccatctctactaaaaatacaaaattagccaggcatggtggtgcatgcctgtaatcccagctactcaatctggaggctgaggcaggagaattgcttgaacccaggaggcagaggttgcggtgagccgagatcgcaccactgcattccagcttaggcaacaaaagcgaaactccatctcaaaacaaaaaaaaaaaaaaacaaaaaaagaaaggtaaggcaagaaaatatgttcacagaatgatttattccatatggagaatggagaagagaggggagtgagattggggtaggactctcggggggctgacaatattctcttttttttgacctggatgggtaatagggtttggatttttcaatctttttatggaactataatgtacatgcaaaaaagtgcacaagtcaatagatcttcctaaaccagacacacctatgtaatcagcacccaaatcaagaaatcaggtatttctaatacctcagaaccctttatattacctttagagtctctactcactccttcccagaggcaaccaccaccttctaacaaaatagattttgcctgcttctatgctttatataaatggaattataaagaatacaggcagccaggcgcggtggctcacgtctgtaatcccagcactttgggaggccgaggcaggtggatcacgaggtcaagagatcgagaccatcctggccaacatggtgaaaccccatctctactaaaaatacaaaaattagctgggcgtggtggcacgtgcctgtagtcccagctacgtgggaagctgaggcaggagaatggcgtgaacccgggaggcagagcttgcagtgagcggagatcatgccactgcactccagcctggcgacagagcaagactctgtctcaaataaaaaggaatacaggccaggcgcagtggctcacatgtgtaatcccagcactttgggaggctgaggcaggaggatctcttgagcacaggagttcaagaccagcccaggcaacatggtgaaaccccatctctacaaaaaatacaaaaattagccgggcgtgatggtgtgtgactatagtcccagctactcggaggctgagatgggaggatcacctgagcctgggaggcagagggtgcagtgagctgagattgcaccactgcactccagcctgggcaacagtgtgagcctgtctcaaaaaaaaaaaaaaaaaaggatatactcagattttgctttttaatcactcttaaaactatacaaatatattttatgggccaggcgcggtggctcatgcctgtaatcccagcacttagggaggccaaagagggaagatcacctgaggtcaggagttggagaccagcctggccaacatggtgaaaccctgtctctactaaaaatacaaaaattagctgggcgtggtggcacgcgcctgtaatcccagctacttgggaggctaagacaggagaatcacttgaacccgggaggtggaggctgcagtgagccgagatcgtgccattgcactccagcctgggcaacaagagcgaaactccatctcaacaaacatacatatataatatatataatatacttttctatattataataaatgtcaaaatttttcaaagccaccaactaacctctgtgccttagcaatccccaaatacagagcttaaggcttgtgataataacaacacctaaggtttgtttagaactatgcccaagcttttacatgctataatctccttaatcccaggatgtgtgaatatcatttccatttcacaggtgagaaaaccaaggctctgtgaggccacgtgggagacctgctggacttcataacccacgttcttcacagctaaactatacagtcaggagagagatccagtgatgaggcgggcaggcctcaagcagttccagccccaccctgccacggtcctcagagtacagctgttcctgccagtgacccagtcctccctcccccatcccatcatcccccaccaaggccatacctcaaaaagggcagtggggagagggggccctggagagaaggccacagactcacccatagtcacggagaccatcgtctccctggccctgacactgctccctggagcctgaaagagaagagaggagagagcccatgagctgctgccggctgtgagtgtttgtccctctcctgtgcctgtctgtctgcatgccagaggaatgttcctgggctaggggctcaccgcccaggaatagcctggagcagctggcaggaagtcagcctgggacagagctgccaccaccatcatcgcttgtgcctgagacaaggcccagggacagcaaatgtccacagctccattcacacacaccccaaaaggttggctggaaaaggagtgcaacagaaataagacacttctggccaagactttaacaataaataccagccaagcatgctggctcatgcctgtaatcccaggactttgggaggccaaggtgggaggattacttgaagccaggagttcaagaccagcctggacaacatagcaagaccctgtctcaaaaaaaaaggctggtccgaaggtagtgaattatctcaattgactgttcatagtcctttacagatggaactccttattctactctttctccttttctcactactgcagttgactagtcttcaaacaaacaaacaaacaaacaaacccaaaaccctattcactgagaacctactatgtgtaaggcacttagggataccaagttgaacaaagccatggaacttagcagctagctgggtacaggggacaggggagacagagagtaaacaagccaaacagttaatatagtacgttaggaagcctttagtgccacggagaagacatggaggacctgggaagggaggggttgtaattttcagcagagtgatcagggaagacctaaagcaacatttagagacctaaagggagggaagcaatgagccatgtggttttacagagaaaaagtgttccagaagaaggtacagcaagtccagcgccctgagccagtggctcatctggcatgctggagggaaagcaaggagccagtgtggctgcagtggagcgagcaggaaggacactgggaggagacaggtcacagaagtggcgacctgatcatgagacgtcccagagaagacatggaaaaccaattttcccttacattagcagatggtagaaaggtggtgttaaggacatattagcaccaatggagactgtctccgttaaaagcagtgttgaatgggaactaaaggaaataactttttcatgtgctgattcaacgctatgcgactccaggatcatggggcccacactgccctggcccaaacttccttcctacttagccctctgcctcttccctgacccggctcctctgccctcttccctcactctgttcccttctatctaccgcagcccccaatactgatcctccctcacccccgcatggggtgcagaagccctctgtcccagaaccttcctgtttaccaccccatacgacctgtcccatcccctaacagattttgatggtataatggagtggtcaagagtaacaactctgcaaccagactgtacagttcaaatccagctctaccacttattagctgtgtgatctcggcaagtgacttcaacagtcaggccgcggtgtcaccatttgtgaattgggagggtgcaaacatgacttaccttagaggactgctataagggctggatgagtttctatgaataaaagcacttgagacagtgcttggtgcctactaagcaccctggaggtgttgtgcctggtctcatcctccaggcctccttccccacacaggtgctttgccggcctcccagtttttagaggatgtcacctgtgcctggaatgcctgtctcctcctggcaacctatccttccttctgctccactgccatctactttgtgacactttccctaagtccccacatatgagactctcttctctatcctcactagggttaatcttgcccttctctggcttctgctcaattttttttttttttttttgagacaaagtcttgctctgtcgcccaggctggagtgcagtggcgcgatctcggctcactgcaaccttcgcctcctgggttcaagcggttctcctgcctcagcctcccgagcagctgggaccacaggcactcgccaccacacccagctaatttttgtatttttagtacagatggggtttcaccatgttggccaggctagtctcgaactcctgacctcaagtgatctgcccacatcagtttcccaaagtgctgggattacaggcacctggccttctgctcaatctcttattgatgagtatgaccacagacatcactctgtcctgtactcaacactcttagatccaatttccctcctgaattttaccactggccaaagacaatacaggccaggagcagtggctcgtgcctgtaatcccagcactttgggaggtcgaggcaggtggatcacctgaggtcaggagtttgagaccagcctggccaacatggtgaaaccccatctctactaaaaatacaaaaattagtcgggcatggtggtgggcgcctgtaatcccagctactcggcaggctgaggcaggagaatcgcttgaacccgggaggcagaggctgcagtgggccgagatcacaccactgcactctagcctgagtgacagagcaagactctgtctcaaaaaataataatgaaataaaatacagtacaacatgcatctctcaaagaacagcacggagaggtctcagtaagtcagacagaacatctcacaaaccaagcactaactatgcatcaggaccagcgccaagcatcatgcagatgcatcccaacagctcagcaagtgaggactattattagccctgtttttatcgatgaaaaaccccgactcattgaggtgcagtcgtttgtcaaatggcacatctagcaactgaccttactgggattcaaaaacaagttcttcctgattctgacgtccagggaataggtcccattgagtgcttactatgtaccaggaactgagcatatacacatctcagtcgctcctcacaaccaccctcggaaagttacagatgagaatggcaggtccaagatcacacagcaaaaggctgggcacagtggctcaggcctgtcatcccagcactttagggtcaggaggatcccttgagcctaggagttcaagatcatatagcaagtaaaggaagcagcaggacttggaccccacgcagtccaatggctatggttcatgctgattgagggattactaccagccaggtactatggtctgtttttcaatgtctcagttaatgctaaccagaatcctttaagtactggtattctcccccaagtgctacagaccctactgaattcaatttcctctctccacaatcttaaaagcccatctccagcactgactttccgaatagtgaaaattataatagtgattttaaagacagcagctcccaaaactcaagggattaccacataccagactccatgtgctaagcccttagaagacctgtatccaaatcccaattttaccacgtcctaatcctgactctggacaagtagcttaacctttctgacctcacttccctcaactgcacaataagaatggtaaggccgggtacagtaactcacacctgtagtcccagcactttgggaggccgaagcaggaggatctctggagcccaggattttgaggccagcctgggcaatatagcgagaccctgtcactgttaaaaaaaaaaaaaaaaaaaaaaaaactgggcgtggtggctcacgcctgtaatcacagcactttgggaggctgaggcgggtggatcacctgaggtcaggagttcgagaccagcctggccaatatggtgaaaccccatctctactaaaaatacaaaaattagccaggcatggtggtgtatgcctgtaatccaagctactcagtaggctaaggtgggagaatcgcttcaacccggggcgggggggggagaggttgcagtgagccaagattacgccacttcactccagcctgggcaacagagcaagactcagtctcaaaaaaaaaaaaaaaaaaaggaaaggtggctgggcgcagtggctcatgcctgtaatcccaacgctttgggaggccaaggcagtggatcacaaggtcaggagtttgagaccagcctggccaacatggcgaaactccgcctctactaaaaatacaaaaaattagctgggcatggtggcaggcacctgtaatcccagctactcgggaggctgaggcaggagaatcacttgaacccaggaggcagaggttgcagtgagccgaaactgtaccactacactccagcctgggcaacagagtgagactccatctcaaaaaaaaaaaaaaaagtaagattaccaattcttggccagcaccttgggaggctgaggcaggtggataacctgaggtcaggaattcaagaccagcctggccaacatagtgaaacccctctctactaaaaatacaaaaattagccaggcgtggtggtgggcacctgtaatcctagctactcaggaggctgaggcaggagaattgcttaagcccgggaggcagaggttgcagtgatccaagatcgcaccactgcactccagcctgggcaacagagcgagaccttgtctcaaataaataaataaataaataaataaataaataaataaataaataataaaaataaaaaaacaccatcttaaaaaaaaaaaaagaggacccttttttttttttgagatgaagtcccactctgtcgcccaggctggagtgcagtggcgtgatctcgtctcactgcaacctctgcctcccaggttcaagcaattatcctgcctcagcctcccaagtagctgggattacaggcccccaccaccatgcccggctaattttctgtagttttagtagagacggggtttcaccgtgttagccaggatggtctctatctcctgacctcgtgatccgcccgtctcggcctcccaaagtgctaggattacaggcgtgagccaccacgcccagccaaggacccattcttaaaggtgttacaaggattaaacgagttaataaacagagtccttagaacaaagatgcacggcaggtggttaagtgcgatgttaagtgtgcatcaaataaaacaaatcttcagtaagctagggaaacagtgggacagtcactgacttaatgctagttttatacaaagtgtgagctgggaacaagtataaggacaacttaatgggggtccatgggatctgacaacagggaatcacacagtacaggttctgaacagtatccctattcaaagggaatacgtagtattccttttcaattatctttccatttcagtgtacaatgtaatgggctgttcagtttccattgtattttacctgaacttttccttcctctcatggccagcaatgctagttttccattgaagacagcaatgcgccgggcacggtggctcacacctgtaatcccagcactttgggaggcagaggcgggcagatcacctgaagtcagaagttcgagaccagcctgaccaacatgcagaaaccccgtctctactaaaatacaaaaaaaattagccgggcgtggtggcgcatgcctgtaatcccagctactcggaaggttgaggcaggagaatcccttgaacccaggaagcggaggttgcggtgagacgaaattgcaccattgcactccagcctgggcaacaagagcgaaactccgtctcaaagaaaaaaaaaagaagaagacagcaatgcaaatttgccttctcaaattaacttactggggaaaaaaatgcactagtcattatcaagaaaaagaaaaaaactagtacttcaggactcagcaaaattggtcaaatagtaagtgacaggatgtcgatttccccggctccaattctaagtttttcctattgctgtctctgagctttctcccccagcttccctggaattcccagctacaccaatgactctcagaatcattatcattatagtcccaatccacgagctctcactgtgccagcccctctgcttaaaatctttacacacacagatttcatcagaatcctcaagacgaccctatgatattgggactatctgctctcattgtacagatgagaaaaaacggggttcaaggaagcgaagacacaggccccactgccgcacagtggagcgggacttgaaccaaaattcgacggcttccaaacccaacaatttttcatactaagcgctcaaacatcaatactaataataatagtatagtaacgaagtgagcgttatgcggaggcgctgagctaaggcatccaacgtacacgacctgacttctcactcccatttataaagccggtgatacagtcggattctaacccccattccacaggggaggaaactgaggctcaaagaaacaaatcgtaagtccgaagccgtacaacggagcccgaactgagtccagacacccggacgccacccgtccctaccgcaaccggcccagtcccaccacccccggcccgcgcctcacctggcccaccgggcccgcgcccactcgcgccgcccgccctccctcccggcggcgccaactgtcagacactcctcccccggcccgggctgcccgccccggaagcatcctctcaccgccggaagctgaactgactcgtccgcggccgctctaccccaacaggccgccaccagcgagagtgcggccataaccatcacgtgaccgcccaccgacaccagcgagagtgcagtcgtaaccgtcacgtgaccgcccaccgtcggcccggcgctcccctccgcccgaagctagcaagcggcgcggccaatgagaaaggcgcatgcctggcccccgccggcctgcagtctagccgtagtgcgcctgcgcgcggctaggaggggccgtcaggcggggatacagcctggaaggtgcgtgtggggctgggtctcggagtgggagacgtggagtgcaggtactgtgcgatctgggggcgcggcgcctcggctaccctcctcgtgttgtcttccacgctataatgcatggaatataatatatattatatggaatataatatatggaatataatatatataattatagcgttgtcttccacgctataatttatgtcgtcctcggtctctttatgtcaccattcctctccttctgtctcatcccacttaaatcctcacaactccttctgtcgccatcaccctctttaaatcctcacaactcctcttgttgtcatcaacgcccttaactcgctttcgttccctgtaagccctctttgccaccataggtcgtaatcgctccctttaaattcgtcatcgccatatgttacctgcatcctgcttttgttgccatttctcctttataaaatcctcatttctctttaaaccctcatcatacccccaagtcaccttcgcatggctactgtccccatcgctcttcttaaatcgcgctaatgcaactcttacgtcatcattaccccttgtgtctttgtccctcccttggcatcactgttcctctgaccagtcaccatccactcctcatgcttccagttttccccataaggagccacccagccttacagttatttttcttccctccgtgtcttcgtcatttccccgtgtcacatctcacataacatacggggtactgcagcccattacctggggtgtgtcagaatcccagccccaccactacacctctggataccttgactgccttatggcacctttccaatcccagcttcatctgcaaaatgcacacggggacatccacatcagggctgagtgtgacgattctgtgagtttattcttgtggtaggctcagcttgacatggtgtttttggctaatattgttattaaccatgtcaccctcggccgggtgcggtggctcatgcctgtaatcccagcactttaggaggccaaggtgggcggatcacctgatgtcgggagttcgagaccagcctgatcaacatggagaaaccccgtctctactaaaaatacaaaattagccgggcgtggtggtgcatgcctataatcccagctactcgggaggctgaggcaggagaatggcttgaaccggggaggtggaggttgcagtgagccgagatcgcgccattgcactccagcctgggcaacaagagcgagactccgtctcaaaaaaaaataataataataggccaggcgcggtggctcacgcctgtaatcccagcactttgggaggccgaggcgggcggatcacctcaggtcggaagttcgagaccagcctgaccaacatggagaaaccccatctctattaaaaatacaaaattagccaggcatggtggcacatgcctgtaatcccagctactcgggaggctgagacaggagaatcgttcgaatctgagaggcggaggttgcagtgagcctagatcgtgccattgcactgtagcctgggcaacaagagcgagactccgtctcaaaaaaaaaaaaaaaaaaaaaaactgcatgatcttgggcaactaacttaacctcccagcgcctcagttactgcatctgcaatatgggaatgaaaacacaaattaatcattctgcacataattcttaagcatgtactatatatgtgcccaacactgctagacactggggatacctcaatgaacaatacagacaaaaatatctcggcctggcgcaatggctcacacctgtaatccaagcactttgggaggtgaagtgggtggatcacctgagaccaggagtttgagaccagcctggacaacatggtgaagccccatctctactaaaaatgcaaaaattagccaggcatggtggcgcgcccctaaaatctgagcaactcgggaggctgaggtgagaggattgcttgaacccaggaggcggaggctgcagtgagttgagatcgcaccactgcactccagcctgggtgacagagtgagaccccatctcaaaaaaaaaaaaaaaatctggccttatggactgtgtactacactctagtgggggtaagaggcaatgggtaaataggtaagtagattattggatgtattagaaggggcatggggaatgtggggtcaaggttatagttttaaatagggtggtcagggaaagctttctgagaaggtgacatttgaaacaaatacttgaaggagaagagagagtagggctgggcacggtggctcacgcctgtgatcacagcactttgggaggctgaggaaggtggatcgctggagctcaggagtttgagatcagcctgggcaacatagcgaaaccccatctctacaaaaattagccaggtatggtggtgtgcgcctgtggtcccagctacttgggaggctgagaggtggggggatcgcttgagcctgggagttcgaggctgcagtgagccatgattttgccaatacactccagcctgggcaacagacggagaccctgtctcaaaacaaaaaaacaaaacaaaacaaaaaaacggccaggcgtagtggctcatgcctataatcccagcactttgggaggccaaggctggcagatcacctgaggtcaggagttcgagaccagcctgactaacatggtgaaacctcgtctctactaaaattacaaaaaattaggcaggcatagtggcagacacctgtaatcccagctattcaggaggctgaggcaggagaatcgcttgaaccagggaggcggaggttgcagtgaactgagattgcgccattgcactccagcctgggcgacagcgagattctgtctcaaaaaaagagagagagaaagaaagagtgacatggccctctgggggaacagcatgctgggcaaagagaacagcaaaagcaaaagtcttgcggtaggagcaagcttggaatatttaaggaatagcaaggaggtcagtgagagaggagaggggcaagagacgacattggaggggtgatggggcacatcgtggaaggccttgtgagccatgcagaaggctggcttttactcccagtgaggtgggtgccacaggaggatgtggagccgaggagggatgcggtccagtgtgacatgaagccatcaccctgagctgtggcagctccagaacttctacccaggatcgactagtgagaggcagccttattggaaagagagccagaatcttcttcagtccgcactcacatatcctttatgttgggagaaagtttcaaatatccctgtcaaagatcgagaccgggcgtggtggttcacgcctataatcccagcactttgggaggctgaggcgggcggatcacttgaggtcaggagttcgaaaccaccctgaccaacatggtgaaacctcatctctaccaaaattatataaaattagctgggcgttgtggcttgtgcctgtaatcccagctactcaggaggctgaggcaggaaaatcgcttgaacccgggaggcagaggttgcagtgagccgagatcacaccacttcactccagcctgggcaacagagcaagactccatctcagataaataaataaatagtcataaaatttgagggcaggctagggaaatgctaacggaatttttgagaggccggcgccaccacggggttcagctgctgtcccagacggtggggggcaggcagcaggggatctacagatgatgaacaacaggagaggcagctgtcatgtggcatctgtccctggaagcttgaggcagcttgggttcaaatccttgctccatttcctctctctttttttttaaccaaagtccagttccaggcttaccacatatcctatttctctttatacctgtgacttcacctctctggatccttaattccctaagtgggatttttaagaggactgttgtgaaaattaaatatattaagtccaatttaaaaaaataaaacaaatatattaagtgctttgaggccaggcacagtggcttatgcctgtaatcccagcactttgagaggttgaggtaggcagatcacttgagcccagcagttcaatagcagcctgggcaatgtggtgagatcccaactctacaaaaaaataaaaaactagctgggcatggtggcacacacctgtggttccagctactcaggaggctgaggcgagaggatcacttgagcccaggagttccaggctgcagtgagatgtgttcccaccactgcattccagcctgggcaacaaagcgaggagaccctgtctcaaaaaaaatcaaaaatgaatgcaagaagccccattgtctcactccacaccctgcacttttgcaggctcacgcctccctcaagctgcagggtccctcgcctgatgtgatgaagggagattttgcattgttttgttcatgaattagttcaaccatgtactgccctggaatacaactgagctctgggttcaaattcctagctgatccctataatcccagcactttgggaggctgaggtgggcagatcactcgaggtcaggagttcgagaccagcctggccaatatggtgaaacactgtctttacaaaaaatacaaaaattagccaggtgtggtggcgggcacctgtcatcccacctactcaggaggttgagacatgagaatcacttgaacctggaagatggaggttgctttgagccgagatcctgccactgcactccagtcttggtgacagagtgagacaccatctcaaaaaacaaacaaatttccaactgacaaaccaatgctgtgcaacctaagcaggtaatttccctgagccctgccacctcatctgaaaaacagagatggtaacactgctttgccctaaacttaccatgttattatttttcttttcttttcttttcttttttttttatttgagatggagtcttgctctgtcacccaggctggagtgcagtggtgtgatctcagctcacttcaagctctgcctcccaggttcacaccatcctcctgcctcagcctcccgagtagctgggactacaggtacccgccaccacgcctggctaattttttgtatttttagtagagatggggtttcactgtgttaaccaggatggtctcaatctcctgacctcatgatccgcccgccttggcctcccaaagtgctgggattacaggcgtgagccaccacacctggccctaccatgttattatttttctttctttatttttttgagacagggtcttgctctctcacccaggctggagtgcagtggtgcagtcatggctaactgcagaccaagctcccaggctcaagccatcctcttgcttcagcctcccacgtagctagggctacaggcgcataccaccatccccagctattttttagccttttttttttttttttttttttgagacagagtctcgctctgttgcccaggctggagtgcagtggcgcgatctcggctcactgcaacttccaccttctggggtcaagcgattcccctgcctcagcctcctgagtagctaggattacaggtgcatgccaccaggcccggctaatttttgtatttttagtagagacggggtttcaccatgttggtcaggctggtctcaaactcctgacctcgtgatctgactgcctcggcctcccaaagtgctggggttacaggcgtgagccaccacgcctggcctaggctttttatttttctgtagagacaagatctcactttgttgcccaggctgcccaggtctcaaactcctgggcttaagtaatctccctgctttggcctcctaaagtgctggaatgacaggtgtgagtgagccactgtgcccagccatgttattattattattttatttttcattgagacactgtcttgtgtcacccaggctggtgtgcagtggtgcaagctcagttcactacaacctctgcctcccgggttccagtagttctcctgcctcagcctcccaagtacctggaattacaagtgcgtaccaccacgccctgctaatttttgtatttttaacagagacagggtttcgccatgtaggccaggctggtctcgagctcctgacctcaagtgatccacctgcctcagcctcccaaagtgctgggattacaggtgtgagccaccgtgcccggctgtgttatttttgtttttgtgttgttgttttgagactgagtctcactctgtcgcccaggctacagtgcagtggcatgatctcagctcactgcaacctccgcctcccaggttcaagcgattctcatgcctcagccccctcaagtagctgggactatagatgcacaccaccacgccctgctaatttttgtatttttagtacagatggggtttcaccatgttggccaggctggtctcgaactccttacctcaagtgatacacccacctcggcctcccaaagtgctgggattacaagcatgagccaccatgcccgaccctgttgttatttttgaactgggacataagcctttggcagttgtgatgccactgtctccctcccctgctttatttttttccaaggcacattccatgtatttcactcatttattttcactccctcactcccttagtagaataacatctttaagaagattttttttccttttttttttgttttttgttttttttgagacagagtttcgctcttgttgcccaggctgaagtgcagtggcgtgatctcagctcaccgcaacctctgcctcccaggttcaagtgattctcctgcctcaccctcccaagtagctgggactacaggcacgcgccaccagggcctggctgattttgtatttttagtagagacgggtttctccatgttggccaggctggtctcgaactgccaacctcagatgatccgcctgcctcagcctcccacagtgcttggattacaggtgtgagccaccgtgccggctcctttttttttttttttttttttttttcctgcaatctcagtttctggagcagggcttgtcagcaagtcattattgattaaatattagttgaattaatagattaattaactggccactgagcacctgctatgcactttcctatgctccatggtactggggacatggcagtgagttagatagcctggacctgccgtcataggtctcccagtcaaataggagagacgaacccatcattaggcactgccagcagcaagcactgccagctaatcacagcactgattttgagcaggagtgggacagcttagatttctctagttccaatttagaagtgttcaccattcatgatgctttcttggacctatttaattgtttttcagactgaccgtcttctctccctaggaggcataggcagagggatcagggctgggaaagggaggcccaggggactgtgtgagcccagagggcttcatggaggaggtggtatgtgagcggacagaaatgagcaaggtgtgctcggcagggaaagcagctgtgggagggtctggtgatgaaagtgtggttttggttcaaggaactgaaagatcataaatatggctggggtgggaagaacggtgagagagtaggccaaagaggtcattcagggaagatcattcaaggccctgtcagccacagtgaggagctgagactgtgtactgaggacaccggggagccacagagtttttgagcaggagagggatgtgtcaaattcacgtggaggtcggattgcaaggattgagtggagtctggaagccaagggaggtggctggagtggggacccaggtgggagagactaagtcagagcttgtgggggagggcgaattggagagaccctcacaggaccaagtcgacaaatggttggggtccaggacaaggcccagggctgggggtagtcaaggagagctttctggaggaggaggcaccaaggctgagacctgaaggatgggttcaacagctcttcttgaaatggggacctggggcaggaagatggtaaggacagttggggacatagtaggtgtgggagtctggggacaccttgaaggaggtatctggggggccctggaacctctagagctggagtcaggggaaaggaggaaacaagacagagctttgggttgagaaagagggaattgaagctgtaatgatgggggaaggtccacaggggcctgtccatgtagggctctgtaggacatggtaagaagtttgtcctttgtcctgggggcaatggggagccacagaaggattttgagcaggagtgagacagcttagggtttttaagttccagttcagaagtgtttatcattcatgatgctttttggacctatttaattgtttttcagactgactgacttctctccctaggaggggcacttattttaaagggtccgttgaaataaaagatctaactgctgaaaatgaaaaatcagtttgcaaaaccagtgttctgttccgttttctgtagacaattgatggttcagtccaaagaggtcagaaacaattgatggtttagtccaaagaggtctgtaccatctagtgaaaatcagcaccattaaacatgagaacatttctgttttaaaccatttggaagccccgtgaattttattttattttgttatttttaaaattagagacaggggtctcgctctgttgcccaggctagtctcgaactgctgggctcaagcgatcctcccacttcagcctaccaaagtgctggaattacagatgtgagctactgctcctggccagcctgtggatttgtaaatgtctcctgtggtgtgatctgcctcatgtttcctgtatgtaggcttcagaagcacactctgcattctcagatggcttgaatcagccttgactttttccccaccctctcagcctgaatctcaggttgagatgccattatctgcacccaccctatatgctctgggcttagaactgataccagctggttatcattgtgtataaaagtgtcactaggtatagagagacatctaaaataatctcctctcaaaattttctattctgctgctccatttcttctgctttcagtattttttgagcaattacaatggtctgggccctagagctagaggaataaatcagacacggacatagcaagggacacatatgttgattatgtgtgattaaaatgtatacaagatacgagggcgtacacagatctcaccaactagcatgtttcaagggcttactgtgcttcctgccttccatggatgatctcattgacttcccaacaaatgtgaggttggtattattaatctccacattgttcaaagaatgaaagtgtggcttagagaagggaacctcttttcccagttccacagagctgagatctgaagtctgagctgtgggactctgagacccacccccttaaccattcagagatcccccagccaccaccctccagtgcatataagatgatacccatttcatttgttgttttgagaccgtgtcttgctctgtcgcccaggctggagtgcagtggcacaatcacggctcactgcagccttgacctcctggactcaagcagtggtcccacctcagcctcccaagtggctgggaccacaggcgtaggcatgggctaccacacctagccaattatctttttgtttgtttgtttttgagatggagtttcgctcttgttgcccagactggcatgcaatgatgcaatctcggctcactgcaacctctgcctcccaggttcaagcgattcttggacctcagcctcccgagtagcctgccaccatgccaggctaatttttgtatttttggtagagacgaggtttcaccatgttggccaggctggtctcgaactcctgacctcaggtgatccacccatcttggcctcccaaagtgctgggattacaggcatgagccaccgtgcccagccgcctagccaattttttaagtttttgtagagatggggtcacaccttgttgccccaactggtctcaaactcctgagctcaagccatcctcccgccttggcctcccaaagtgctgggattataggcataagccactgcgccctgccaatatggctaatactggtttatagatgaggccagcagggctcagaagtaaagccccatgctcagcatcactcagcaagaaagtggcagaggtgtgatctgaaccatgagctctccaatttaaagggctgctgtagaggaggaatcaaatctcccactgccaccctcccctgggggtggggtgttcagggatctgtgacccagtgggttttacttcctcctttttgcgggctatggtgtcatactccaaggggggcaggaccacaaggcaaggggactagggggtattctgtgggctgggagagagcacgcttcctggcagtgccctctcccagatgagacctgatctcttttttgttttttgttttttgttttgagacagagttttgctcttcttgcccaggctggagtacaatggcgcaatcttggctcactgcaacctccgcctcccaggttcaagcgattctcctgcctcagcctcctgagtagctgggattacaggcatgcgccaccacgcccggctaattttgtatttttagtagagacggggtttcaccatgttggtcaggctggtcttgaactcccgacctcaggtgatttgcccacctcagcctcccaaagtgctggattacaggtgtgagccactgcgcccgaccgagacctgatttcatctcatgtcataccagcaaggaggcagagcataagtaccaacctggatggggcgcgctgggagccccatggaggttctagggtcctgagaatacaggcattgagacgggctgaggaggaactccagcatccggctgcccgtgcccaccttcagtttcaccctaccctgctcccacaaggatctgagcagggagggggcctgatttccttctcccgctgagaccacagtcctctggaggctaggatctggtgatggggcaccctagctaggagcctgagcctctttataatttagtttccatagaagttatatgtgcatttaaaaaaattcaatgtaagtaaagacctacaatgaaaagcaaccgtcttgtctctgggggtgggatgggggatgcctttgcgtggggagctgttaggagacttgacagtcacctttgctgagagcctcctgcatgtcaggggctcttctatgcacattatatgtgtgctaattccttttttaaaactttactttttgtggagatgagtcctgctgtgttgtgtaggctggtcttgaactcctggcctcacgcaatccacccccaaccttagcctcccggagtgcagggattacaggtgtgagccacctttcccagcctgttgactcctttaattcagaggagtcagtcagattttagacatctcaaatgttgtatgttcaaaaccaaactcctggtcttttccccaaacttgtgtctccctgtcttgcccaatcagctgttgacacctccaatccttgcagttgctgcggccaaaactcagtcatccctcactcctttactgctctcaaacccacatccagcctagaaatgccatcccctccaccttcaaaatgcatccagaccccgccctttcttcgacacttggctgaccacaccctggtcctgtccacccttggctcctgtctggatgctcccagcagcctcctccctgggctcccttgccctgccccagtctgttccccacgcacagccgccaggggatcctgtaacacctgtgtttgtttcttcgggctgctgtaacaaattgccaccaagttggtggcttaacacaacagaatgtatggccaggcgcagtggctcctgcctgtaatcccagcactttgggaggccgagacagtcgatcatttgaagttgcaccactgcactccagcctggataacagagcgagactccgtcttaaaaaaaaaaaaaaaaaaaaaagacaacaaattcattctctcagttttggagccgaagtccaaactcaaggtgtagcagggccatgcgcctccagaagctggaggggagattccattcctcacctctcccagcttctagtggctccaggcattgctgggtttatggccacatcaccctaatgtcagcctccctgttcacatgaccttctgcctgttctatctctgaggacagttgtgattggatttagggcccatccagttagtccaggatgatctcatctcaagatcctaaatctgattacaattgcaaagatcctttttccaaataaggtcacatgcacgtaagttccggggattatgcttgcgtgggacacatcttttttgaggccaccattcaacccactacaaaatccaactgaagcccagcgaagtggctcatgcctgaaatccccgcactgtgcgaggccaaggcaggagggtcacctgaggccaggagttcaagagtagcctgggcagcgtagggagatcctcatctcttttttttttcgagatggagtttcgttcttgttactcaggctggagtgcaatggcgcaatcttggctcactataacttcctcctcctgggttcaagcgattctcctgcctcagcaatcccgagtagctgggattacaggcatgtgccaccatgcccagctaattttttatttttagtagagacagggtttctccatgttggtcaggctggtctcgaactcccaacctcaggtgatccgcccaccttggcctcccaaagtgctgggattacaggcatgagccatcacgcccagtggagatccccatctcttaaaaaaatctgaagcagatcacatcatccttccctgctgggaacccacacgtgaccctgttctactcatcacagtccaggcagccctgcaggatctggccctatcacctctgtgacatctcctctcccactccccccagcccacttcactgcagacacactggcatcctcactcttctccatccacaccaggcacattcctccctcagggcctttgtactgatcatttttcccacagatgtccatctcaccccaccttgaagtttttcttcaggtatccccttctcagtgaggccttttctgacctccttattaaatatcacaaacaattccacccccacccccttccctgatcctctatggcacttactaccttctaacattatatcatttatttattatcttgtttattatcaccttttttttttattttttgagacggagtttcctttgtcgcccacgctggagtgcggtggcgccaactcactgcaacctccacctccctggttcaagcaattcgcccacctcagcctcctgagtagctgagattacaggcgccctccaacacgcccggctaatttttgtatttttagtagagatgggatttcgccatgttggccaggctggtctcgaatgccagacctcaggtgatccacccacatcggccccccaaagtgctggcattacaggcgtgagacaccgcgcctggcctctgtttttccctcgtgtctattttgttcacagctgtatccccagtgcctaaaacaatacctgatgcacacaaggcaaccagtaaatgtgtgtaaaattaacgaacagcaaatgctattgttaccatgcccattttgcagatggagaaaccaagagcacagaggtgttgtcacttctccaaggtcaaacagtcactaagtgcagaagctcagattcaaacacaggtatctggctctagcacttactgtattgtcttgccagtctcatccaatcgaaatcacttctccagtactagtttttatttgtttgttttttatgagacaggctctcactctgtcagctgggctggagtgaggtggtgcgatcactgctcactgcagtctccacctcccagattcaagcaattctcctgcctcagccttccacatagttggaactacacgtccacaccatcataccaggctaattttctttcatttgttgtagagattaggtctcactatgttgcccaggctggtctcaaactcctgggctcaagcaatcctcccaccttggcctcccaaagtgctgggattacacgtgtaaaccaccgtgcctggccctccaatattagtttactttttaatcaaaagttaacacaataagaaaaataatacaattaaaacatcaaaagttaaaattaaactaatcattacagacctgtaatcactgtacaatttggaagccaaaacatcactgacaatttgaacgaagtccatctattttcttcctatttttattttgtttttgtttttattttttatgttcttgtagagactgggccttgctatgttgccaaggctagtctggaactcctgggctcaagcagtcctctcacctcagcctcccaaagtgctgagattacaggtgtgagccacggtgccaggcctttctccttatttttggtttattagtgaccatcccagttctccagccctgacgctgccagccctgttacttcagatctccatgccccaccttgccttcggttttgtttttcttcatcttggcttccctaatttcacattgcctgctgttccaactccatattcttcaataaaaatatgtctcaccaaggccttcaaagaaaattgaagacaagcatttcctgcactccctcctgcctcctccacccacaatgttgtggtcaaccgcctctaagactgatgttatcttctgcttctcctagtgacctctggagtttcaaataaccttagtctgttgctgtttcttgctagatttgtttgtttgtttgtttgtttgtttgtttgagacggagtctcgctctgttttaacccaggctggagtgcagtggcgcaatctcagctcactgcaacctctgcctcccaggttcaagcaattctcctgcctcagtctcccgagtagctgggattacaagcgcccgccaccacgcccagctaatttttacatttttggtagagagagggtttcaccacattggccaggctggtcttgaactcctaacctcaggtgatccacccacctcggcctcccaaagtgctgggattacaggcgtgagccaccacacccgacctgctagatcctttttaggcatccccatttgtcttcctgccatgaaaagaggggatctagcatgttctaccctcgccagtctgggatctgacattggtagggaggagtttgcaagttatccctacaaatctaggttggatcttggagtaaggggagcacctagctctgagagttttctttttcttctttttcaaaaaagagtaatgcgcgcccctgattttttaaaaggtaatgaaactggtgacgcctgtgtttgctttataattatttctcaacctacaccgagatattttctatacttctctgaaaatagcttatgtttcacaattttaaaaaagaaaataggctgggcacagtggctcatgcctgtaatcccagcactttgggaggccaaggcaggcggatcacgaggtcaggagttcgagaccagcctggccaacttggtgaaaccctgtctctactaaaaatacaaaaattagctggtcgtggtggcaggcgcctgtaatcccagctactcgggaggctgaggcaggagaatcgcttgaaaccacaaggcggaggttgcagtgaaccaagattgtgccactgcactccagcctgggcaaaagagcgaaactccgtctcagaaaaaagaaaataggggccagatgtggtggctcatgcctgtaatctcagaactttgggaggccaaggtaggaggatcacttgagtccaggagttcagcctgggcaataagcaagaccccgtctatacaaaattaaaaaaaaaaaaattagctgcggctgggcgcggtggctcatgcctgtaatcccagcacttttgggggcctagacgggcggatcacgaggtcaggagatcgagaccatcctggctaacatggtgaaaccccatctctactaaaaaatacaaaaaaaaaattagccgggcatggtggcgggcgcctgtagtcccagctactcgggaagctgaggtgggcgaattgctcgaaccagggaggtggaggttgcagtgagccgagatggcgccactgcactccagcgtgggagagacagagcgagactgcgtctccaaaaaaaaaaaaaaaagcagctgggcatggtggcacgtgcctgtagtcccagctgcttgggaggctgaggcaggaggattgcttgagcctgggaagttgaggccgcagtgagctatgatcatgctgctgcactccagcctagggaacagaactctggcactaaaaaaagaaaagaaaagaaaagaaaataggcttacaataaaaagcaatcttgacctaccccaaaatcccactcccttgaagacaaccacttctgccctgttgcttctctcagtaatactccttttctgcagttatctcttgacttcctgccatgtgtgtttgggggagcttgagggaagagggtgtccctgtctcattgagagaggtgccaccctgccgtgaaaagaggtgccaccctctgtcaattaggagaggagggatgagagaggaaaggggtctccagtgtatttctccagccggggccttaaatccctcttgggagatatgggatggggtggatcggaaaataaatttttttaaatccctaccaaaatatcagctggctttttttaaaaaatcaaataccaaaatctaaatagactccaacagaaaattcaccatctcctctgaccttttcttcccatctcatgctgtgaactgtcttctgttgactttatcgctacctttcttcattctgttattcaaccatgatctctccgtttcattttataagcgttttattaatttcatttatgtatttatttttgactaggtaatgcatgtccatggtacacaaattcacaaggtttgtaaatgagaaaagacgtgaggttccttttgttctttacctgtggcctccctgccctacacggggactctagggtggaatgtagcaaagcccatccaccagccatgtactaccccccaacccggccaggctggagcgaccgtgtctggggagccgagccccgcttctcgctgcggtgagcccggactggggcacgcactgcgcagactccccgctgcagtgggcggagctcccacaggccccgccccctcctcccaccctcgttcagcctgtccagacagaagctggggcccaccggaggtagctgcagacgcctgagagcgaggccgaggcccctcaggggtaggtggggggaggctggctggggggatgggcagcggggtggcagggaggccccgatgatccctggctgagctgtgtggtgtgggggcacctgagggcggaggagccacctagaatataccccctgtcccagggctgagaaaagccaggcacaaagacctggggctccgctgacctcatccagcgctgcctttcttggggtgtctacaggttggaggagggagaagggggctgctagaggggagctgcgtgggtgctgatgggggcagggtgggcactgcagagtgaagagcaggcagcagagcgttggattttgagggatttcgaaatcctgctgaccagtgaccagcttcctctttttggggtggtgggcagtgtgccagtggcccccatgattatgaatagccccaagactaatcactcttctgtgatgtctgtccctggaaagcgtagaacaccccacacagtgcccacttttgttctgccagtttggagaccctgacacacccaccttctcacctgggctctgcgtatcccccagccttgagggaagatgaagcctaaactgatgtaccaggaggtaggtggattggggggctcagcagggtggaactgggtacagtgggggtgggggttcccaagagccacctgtcacccccgttgttgtccccatccccagctgaaggtgcctgcagaggagcccgccaatgagctgcccatgaatgagattgaggcgtggaaggctgcggaaaaggtaggagccctccgccaccctcgctctgtctcagagacaggctgggctgcccccctcgggctggctgaccacctcctcctccccacagaaagcccgctgggtcctgctggtcctcattctggcggttgtgggcttcggagccctgatgactcagctgtttctatgggaatacggcgacttgcatctctttgggcccaaccagcgcccagccccctgctatgacccttgcgagtaagtggggggtgctgcagttggtgggggaggggcctgccagaccaggtacacttaagcacacactaaacagggcctgcactcagccctacccagcgcttgcgacaagtgaggaggttgcaggctcccaagtgctcgcccgccccctcctcctccacacacatagtttctatggcagccacagcgtcatcttctgtcaggcctgtgaacagacacagcatcttccacccacatctgtggacccacacacacatctcaatacacgaccttccttccacacctctagacagacacgcagaggatcatgagtccaggcacgcattcaaatacacacagttttaaaaaattttttttaaaagaaaagaaaaactcaaatacagtttagctgggcttggtggctcacgcctgtaattgcaacactttgcggggctgaggcgggaggattgcttgagcccaggagttccagaccagcctgggcaatgtagtgcggctccatctctactaaaagtaaaaaaagtaaccaggcatactggtgcacacctgtagtcccagctactcaagaggttgaggcgggaggatcgcttgagcccaggggttcgaggctgcagtgagctgagatggcgccactgcgcttccagcctgggggacagggcaagactctgtctctaaaaaaaaaaaaatacagtctatccaacacacccatggacggacagctgagcactcacctcccagcccttgctctccggcaccgtatggctgatagcatcccccaccccccagagcagtgctggtggaaagcattcctgagggcctggacttccccaatgcctccacggggaacccttccaccagccaggcctggctgggcctgctcgccggtgcgcacagcagcctggacatcgcctccttctactggaccctcaccaacaatgacacccacacgcaggagccctctgcccagcaggtacctgcaaccttggccctggccggcagcaggggcagggggtgggaggcagcgggggctgtggggaatgaaggggtttctcctgcagcccaggagacagaggggtgtgtctcacacagcagattggacacaggtgtttgcaagcagctgtcgtcacgtggctctctggactgggggcgtttgtcacggtcatctgtaggcctctgaatgtcagggtgcgggtttggttacaagggattattaggctggcagatgtcactcacccacaagctgtcctgacccagtcacacaaagaaagggaagagtggagtaattaacagcccagcctcaagacaggggccacctcccagctgtgtgaccccaggcaggccacctcttctctccagcttcagtttctttatctgtaaaatggggccaatttatagcacctgcttcttagggctcttgtgaggatgaaatggactaatccatgcaaattttagcacagtgcctggcacagagtcagcctttgtgagtctgctgttactatatatcctggtatggtctgcagacaaacttaaagaacataaaagcttcacaatttgaaaaggaacagcctacatggataacctcttccattgaaaaaccatgaatttgttccttctgttttcttctccctactggctctttttgtgagaagttgtcttaaaacttaactaaaattacaaggctccttaagaactgcctgaaaaaaataattatggccaagtgtggtgattcacacctgtaatcccagcactttgggaggcctagacaggaggatcactggagcccaagagttcgagactagcctgagcaacatagtgagacccgccccccacctcccctcaaccatctctactaaaaataaaaaaaaattaggagggtgttgtggtgcatgcctgcagtctcagatactcaggagatggaaggaggaggatggcttgagcccaggagttggaggctgcagcgagccgtgatcatgccactacactccagcccaggcaacatagcaagaccctgtctcaaaaaaaagaaaaagaaaaagtaataataataattacaaaagttaaaaaccaaagccaggcatagtggtacacacctgtggtcccagctacttgggaggctgaagcaggagaatgacttgagcctaggaattggaggctgcagtgagctgtgatcatgccactgcactctagcctgggcaacatagtgaaaccctgtctctaaaaaaaaatttttttatgttaaaaaaccgtatgagctcccactccctgctggctccctctaaagtggtttaaaacacagatgtaggaggcagatggtctgggttcaaatcctgctccatagctggatgtggtggtgcactcctgaggtactagctacttgggagactgaggcaggcggaatgcttgagcccagggattgaagatcagcctgggcaacatagcaagtccctgtctcaacaaacaaacaaacaaaaaaacaaaaacaaaatcccactccactactgagttctctgtggggattataattaaaccagcctcactgggttgtgagaattcagtgagttcgctgagaagaggcctagaacagggcctggcacacagtaggttccagggcatccttgactgttgctgttgttggcatcatcgtgcctcacccgataccttccaggaccccctgcctgagcctcgcccccaccatactgggagatgcctggaggccctgccttgatgctgaattttgagaaagtccctggaggggcaggaggggtcaggaggacttggagggggatcacagggcaactaattattaaagcagataaagatgtttaaaacagataaggaagtcttttaatattttaatctgtaaagtctttaatctatgcaggctaatgtaaagtctgtttactcctaatcatgtctcaaaataactccaccgggcattaccttgtggggttggagagctggctggtccagcccctcagaagctctcccctccccgcagggtgaggaggtcctccggcagctgcagaccctggcaccaaagggcgtgaacgtccgcatcgctgtgagcaagcccagcgggccccagccacaggcggacctgcaggctctgctgcagagcggtgagctggggcccaactggggctggtctgggcctgggggtacccagcctggcccctgatctctgcccctgctggtcacaggtgcccaggtccgcatggtggacatgcagaagctgacccatggcgtcctgcataccaagttctgggtggtggaccagacccacttctacctgggcagtgccaacatggactggcgttcactgacccaggtctgtctgcaccctgtctaccttccttccaggccactccctgccccacagggcacccagcctccgactgcatccctcactcaatccagagtcctctccacccattctctgtaatggcttccttcttgcctcctaccaggcctccctaatccaagccatgcacggtggctcacacctataatctcaacactttgggaggccaaggtgggaggattgcttgagcccaggagttggagaccagcctgggcaacatagtgagaccccatctctaccaaaaaaaaaaaaataagcccggtgtggtggcacacacctctggtcccagctccttgggagactgaggtgggaggatcacttgagcccaggagtttgaggctacagtgggttgtattcatgccactgcactccagcctgagtgacagagtgagaccctgttacaaaacaaagaatccctaaatggagccctctactgccctccccctgctcctggaagcctggggctccctctgatccccaattgcagctaccagcccctctacatggcattcaagaacctgcgcacccatttgatcttcattgtacatctctgtgtgcctgctctaagtccagccctatcctgggtaatgttgggaacatggtggtaacagatggacctcatggaactcccagcccaatgcagactggcctgtcacctgacagtgacagcccagaggggtcagggccggggttggggagacacaggcagagggtcagggccaggatggagggaacagagggctgtggaagctcagagaccccaacctggggcattggagggtttcccaaaggaggtataactaatctgatccctgaaggatagggaggaattagcgcaagatggaacaggaaacagcttgggcaatgaggtgaagataagacaggacaataactcatgaattcatttcctcaacagatagttcccctaacctttaatctcagcaattatgcagggagatgctgtagatatagctgtgactgagacatccctagtgcctgtcctcccagcccaatgggaagaccagtttgtcaccagaaagaatgaggagggaatcccaagggactgtgagagcccagaggaatgcctggtgcaggctgggtagtcatgggaggcttcctgaaggaggcaacatgtcagcctagacctaagaatgagtagaagctagctcagtggagggtagaagcaacagcagattgcaaacgttcaggaaacctggagctttggaataactgattttcatcaaaacttaagttgataatcattctaggactttagctattggagctggggtggagggggtactgtgggacagggggaaagacagagaccagactggggagtgtccctgtcatctgtgagcactaggccgctatcgctgagctcagcactgccctcctacaggtcaaggagctgggcgtggtcatgtacaactgcagctgcctggctcgagacctgaccaagatctttgaggcctactggttcctgggccaggcaggcagctccatcccatcaacttggccccggttctatgacacccgctacaaccaagagacaccaatggagatctgcctcaatggaacccctgctctggcctacctggcggtgagtctggggcaagtggggcctgtcatgtcccagccccatgccgtcactcacagcctccatctgtccctgtttggtgatgacagggagggcgtatcctgaccatcagttctcaccccagctcattctgcttggtcaggggcctggagtagttcccaacatccctcggcctctatttcagttagaaaatgggtattgtttccaacctgttagggctgctgggagaggtaccctgggttcatgcacaccaaacctttggtgctctatatcatccagtatagccacaggtggctctttcagtttaagttaattaaatgcaattaacaattcaggccaagtggggtggcttatgcctgtaatcccaatactttgggaggttgaggtgacaggatcacttgaggccaggagtttgagaccagcctggacaacatagcaagactccatctttacaaacaaacaaacaaacaaacaaaactagctgggttgggttgtgcatgcatgtagtcacagctacgcaggaggctgaggcagggggatcacttgagcccaggaaatctaggctgcagtgagccatgatcacaccactgtactccagcctgggtgacagcctgtttcaaaaaaaaattgtttcaagccaggcatggtttctcatccctgtaatcccagcactttgggaggccaaggccaagatgggaggatcacttgaggccaggagttcatgaccagcctgggcaacatagggagacatcatttctttctattttttttttttttttggtcttattatttattgttctagataggatacccaagaactagggagacaccatttctacaaaaacataatattaattaaaattagccgggtgtggttgtgtgcacctgtagtccctggggaggctaagacagggggatcacttgagcccaggagtttgaggctgcgtgagctgattgtaccactgcactccagcctgggcaagaggctgttgccctgtctccaaaaaaagaaaaaattcagttcctcatgcagtagccacatttcatatgctcagtagcacctgtagcaagtgaccaccatattggacatttccatcactgtgacaggctctgttggacaacactggctctcgccatggcagatactgatcactctggacaaggcactgatgtttctagctcttgatagtttcactagttgaggcaggcaacccaggtctccctaggtccccctgagcaagttacctgtccaagcccagagtcatcgtggaaggcacaaccctaaggcgtggacgtagggaagtgtgactcattggggtctttcactacaagggcctcccgcaggggatcaaggctctcctcattaccacttccccttttagagcctcagtttccttgtctcttgagcattaaggaagatggggggccaggcacagtggctcatgcctgtaatcctagcattttgggagtccaggatgggcggatcacttgagctcaggggttggagaccagcctgggaaacgtgatgaaaccccatctctaccaaaaatacaaaaattagcctggaggggtggcgggcacctgtaatcccagctactcgggaggctgaggcaggagaatcacttgaacccaggaggtagaggttgcagggagccgagattgcaccattgccctccaggctgggtgacagagtgagactccacttcaaaaaaaaaaaaagggggggaagcgggggagcgggggaactgggaagagggcctggtgaggcactgggcacccgaggggttcccagtcaaggcaggctgtgagcaaatcagggaagaaagtgactcgaggctgggcacagtggctcacgcctgtaatcccagcactttgggaggcctaggcaggtggattgcctgaggtcaggagttcgagacctgcctggccaacatggtgaaatcccatctccactaaaaatacaaaaaaattagctggctatggtgatgtacgcctgtagtcccagctacttgggaggctgaggcaggagaatcgcttgaacccaagaggcagcagaggttgcaatgagctgagatcatgccactgcactccagcctaggagacagagcaagactccatctcaaaaaaaaaaaaaaaaaaaaagacttgagcagaggtcctcaaactgagcatgccccagaatcagctgggcgggcttgttaaaacccagattcctggaccccaccccagcactctgattcagtaggccatgtgcagtgaggcccaggaatttgcatttctaacaagttcccaggtgatgctgttgccgctggatcagggaccttacgttgagaagcactgggttagagcataaattctggaaccagacagcctgggttcgaatcctggctccatttatctgctgtgtgactttaagtaagtcacttaccctctctgagcctcagtttcctcacatgtgaaatggatgtggtgattgaccctcttcttcatggaggctgaggatttggtgagatccacagtacctggcttgtggtgagctgtccgtatgtggggtccgttgtgacgatgaccctggcagggcacatgtcttaactgtcccctcgccctcagagtgcgcccccacccctgtgtccaagtggccgcactccagacctgaaggctctactcaacgtggtggacaatgcccggagtttcatctacgtcgctgtcatgaactacctgcccactctggagttctcccaccctcacaggtactgctgggtgtggagatagggagccgctgcagttggccaggagacgggagagggaatcatggagaccagaaagctggtgggggctccaggcaaggggacagatggaagagaagctgcagggagagacagtcaccaggaggtgaccggaagaaggtatctaggcacttgagacaggagaaagagagattacagaggagacagggatgaggtttcaggacaaggtttgagggaacagagaaaaggatgagagggccgggcgtggtggctcacgcctgtaatcccaacattttgcggggctgaggtgggtggatcacttgaggtcaggagttcaagaccagcctggctaacatggtgaaatcccatctctcctaaaaatacaaaaattagccgggcgtggtggcacgtgcttgtaatcccagctacttgagaggctgaggcaggagaattgcttgaacctgggaggtgaaggttgcagtgagttgagatcgcgccactgctctccagcctgtgcgacagacagagcaagactctgtctcaaaaaaacaacaaaaaaaaagagaaggctcagaatattggggttgagggcaggaagcctgaggcaggggtgcaggatgtgggatttggggaggtaggaggcatgggctggaaacaggatgaggggcttgggggatggggactaaaagtatttgggtttagggtagcaagcttggggatttgtgatcctgggataagaaggataacaaccggccggacgtggtggctcacacctgtaatcccagcactttgggaggctgaggcgggtggatcacgaggtcaggagatcgagaccatcctggccaacatggtgaagccccgtctctactaaaaatacaaaaaattagccaggtgtggtggcaggcgcctgtagtcccagctacttgggaggctgaggcaggagaatcgcttgaacccgggagtcggaggttgcagtgagccaagatcatgccactgcactccagcctgggcgacggagcgagacaccttctcaaaaaaaaaaaaaagaaaagaaaaaaaaaaagaaggataacaaccatacccactgcaacatccaggtggatgatggcacttgtggggctcaaagaaggtattctaggggcagtagataagacagtgggtccaggcatggtggctcacgcctgtaatcccaacactttgggaggccgaggcggaaggatccctaggagtttgagaccagcctgggcaacataatgagaccccgtctctatagaaaaattggaagattagcccagtgcggtggcactcacctgcagtcccagctactcaggagactgaggcaggaggatcacttgagcccaggagttggaggctgcattgagctatggtcgtgccactacactccagcctgggtgatagagcaagaacctgtctcaaaaagaaaaaaaagaggatggaccgggcacagtggctcacgcctgtaatcccagcactttgggaggccaaggcgggcagatcacctgaggtcgggagttcgagaccagcctgacaaacatggagaaaccccgtctctactaaaaatacaaaattagccaggcgtggtagcgcatgcctgtaatcctagctacccgggaggctgaggcaggagaatcgcttgaacccaggaggcagaggttgcagtgagccgagattgtgccattgcactccagcgtgggcaacaagagcgaaattccacctcaaaaaaaaaaagaaagaataaaagaggatgacaacactgggttttggggagcaggaatgggagccacagccaggaagaggaaatagggatgtgggatttatggagacaggaacagggtctgggagccagcgatgaggaagtcctctcaatagctaaagcagggcccaggcttggttccccaaagctgagggcaaagcctgtggacacagccgccctctgcatcctgccccacctcctatacacccgtcctcaggttctggcctgccattgacgatgggctgcggcgggccacctacgagcgtggcgtcaaggtgcgcctgctcatcagctgctggggacactcggagccatccatgcgggccttcctgctctctctggctgccctgcgtgacaaccatacccactctgacatccaggtggtaagtactgccccaagccaccccttggcccctgtgtggggcagtcctagggacacagccctcatgggactcgtctgtcaatgacaagggcagcccagagtgagccctgtcactgtggggaaaccatgggtcagggccagggtcatggggcacagggagaggggccaggaccgggatgagggggcacaggcagaggggttgggaccgggatgggggtgcagagagaggtgttgggaccaggaatggggacatgggcaggtagaggggtcagggctgggattgggagcacaggcagaggggtcagggctgggatggggaggcacaggcagaagggtcggggccgggttggagggcacagagagaggggttagggccagggttgggggcacaggcagaggggtcggggccaggatggaggaggcccaggcagaggggtgagggctggggtggggggcacagagagagggtttgggaccaggactgggggagtgggcaggtagaggggtcggggctggggttgggggcacaggcagaggggtcagggctgggatggaggaggtacaggcagaggggtcagggctgggatgggggggcacaggcagaggggtcagggctgggatggaggaggcccaggcagaggggtcagggccagggtcggggggcacaggcagaggggtcagggctggggtggggatgcccagaggaagcctctgccctagcgggaagggccaaggaagatgttctggaaatgggggcatctgagatgagacctcaggaatgaacaggagccattctgccgggaacagtgttttgcaaatgagaccaccggggcctccctttcagctttcgttctcagagggcccctccacctggccctgttctggcccccgaggattctgtgggaagcagtggagtcccacagatctcgctccacactctgctccctgatcccggggctcctccgactccccctgcctctcacactccttcccatcctcccctcccactcagaaactctttgtggtccccgcggatgaggcccaggctcgaatcccatatgcccgtgtcaaccacaacaagtacatggtgactgaacgcgccacctacatcggtgagtgtcttgagcaccacggggcgctgaagaagagggggttcagacaccaggggcggccccccgagggtgcccttatgctccacccattcctctctaggaacctccaactggtctggcaactacttcacggagacggcgggcacctcgctgctggtgacgcagaatgggaggggcggcctgcggagccagctggaggccattttcctgagggactgggactccccttacagccatgaccttgacacctcagctgacagcgtgggcaacgcctgccgcctgctctgaggcccgatccagtgggcaggccaaggcctgctgggcccccgcggacccaggtgctctgggtcacggtccctgtccccgcgcccccgcttctgtctgccccattgtggctcctcaggctctctcccctgctctcccacctctacctccacccccaccggcctgacgctgtggccccgggacccagcagagctgggggagggatcagcccccaaagaaatgggggtgcatgctgggcctggccccctggcccacccccactttccagggcaaaaagggcccagggttataataagtaaataacttgtctgtacagcctgtgcctgactgagtggtgtgagatggggtgcaggggtaggggacagctggcatgggcctctggtggggacatctttttgtgctgagccctcaacatgtcactggcatgtgctgagccctcagtgtgtgaccagtgtgggttagcatgtactgagccctcagcatgtgctggcatgggttggcatgtgctgagcccttaacatgtagtgtacatgggctgacctgtgctgagcatgcagcgtgccaccctgtggcccggcatggacttagcactcatgtagccagcatgggtatgtgctgcagagaagcatgttcccagattgatcagcagggaccaaaccattgccacatcccaagggtgaacaagcatggctgagcaccagagtgtgcaccaagtgtgaatttaggcctgccaagtggatttacacccagcacgtcccaaatgtgggtgagtgcatgccaaccctgtaaacatgtaggaaggacaggtcaacagacaaggagaccccagcatccggcaaacttgattaacacatactgaacacagcatgttctgagggtggattcccaacacgccaagcacatagcgtatttaggacaagggttagtcaaccaagcacagcttttccctcctagtgtgacagcagcccaggctcccgcctaagccagtggtcaactgggcccagcatcgcagagcaagtcactgggtgccagcctggagcccccattccccccagggccagtccaagccccaggcagtgagagcaggcttgaagcaggactgctgaacagttctatattgaaatagacagaggcagcagggccaagggcgagcgcagggccagcggggtgcagccccctttcctgctgtccttctggccaaggagcatgggccagactccaaagccctgctgtgtttaggagaggtgtgcaggcacgcaccgcaccgcagacggggaatgagaatttctggataactatctttctgtaagaataatttgtgggttcaggagatggctctgaggagcagttcaggttgggagggaatgccagcccagctagcgcagcccccagtgatgggcaggggtggaatcaccatcagtggtgcccggtgacatgctggaggaagctggtggccccccggggtggaccatgctggtgggagcggcggggtgggagcccctgagcccgtgggcccctgacgctctccagggtgcagtctggctcactcagccattctccaggacagctgctggggtcgaagagctcagggtctggcctctgtgggggaagagagaggggcatcagccaagcagtgttagtgtattagtgtctgctgagcctctgtcacctcctcctgatgagggtgagcatgtgctagggtcttaccagtgctgggcctttattgcccctttgtagtgatgtgatgacagctcactgcagcctcgacctccctggctcaagtgatcctcccacctcagcctcctgagtagctgggactacaggtgcatgccaccaaaaccagctaatatttctaattttttggtgcagacgggatctcactatgttgcccaggctctttatcaagcttcttataagtagattactgtgccctgagtttttgtcacagcctggaagtagctgagtaagtgctgagccttatcatatcttgacggtattaggtgtgtgctgagcctcctaagtccctaattgtatcctgaacatgggtgagtgtgtgttgagcctcctcacacactaatcatatcctgagcacgggtgagtgtgtgctgagcctcctcccaccctaatcgtatcctgaacgcacccggctcacctcagcttccatggtcatgttgtcaatgttgggcccatcctcatctcgctgcaggatggccagtggctcagcagaggccccgagatgctctccttcctcccagctgctgccccggcagggcctgtcatcctcaggcgagacctggctcagccgaatgaggttgctgaagttggagtcggacttggaacccgcaggtggcttgcgggccttgtggcggcctgccaggcggctgctgtagaaggccaggatgggctcagggcccgagtcgggcacatggtggccagtgatggctgccttgagggggaccatcatgtcggagaccgcattggtgcaggtctcaccccacagcccatgcccagcctcctgcagactcaggtcatccagctggtcgatggctctttgcatacctggtgccttctcctctcggaagaaggggctgctgccggccacactgcccatacccgcagcctccttctcctcagccagacagtagtagggggtcccatcttctgcggccacgacgggcgtggggggcttcccctccacttgcagcgagaggcggtagctgcgcagcgagagctggtagtagtgggtggtctcgtgggcactgcgcagctgctgcatggacacgaaggggtggcgcagggcagcactggggctgatgcgttcgtgtgactcccaggtcagcatgcgcttgatcagctccaccatgctcttgaggtcggcgtgctccgccagcgcctcccggtcagggaaggttagccgactggccacactgccaccattcactgtctcaatctggtccaacgacttgagcatatacttgcggcgctccaatgggcgcacctggcggggcatggagaagggggcagggttgaccattgtgcagggctagggccctgggcactcctgctgtggcacccacatgtagccccgacttccaggtctgcccatgatctgccttggagctctctggctgctaggagggccaccctggatccgtcacacccaagcccctctaatcgaacccaaatcactggcccaagttccaccccttgccccagacctccagtccccttcagcaccatgggtgcagcccctaccagcagctagcagaagggctgcccggaatctctagtcctccctggaatcaaatccaggtccctcttactgccacagctccacacttgatcccaggcctcctggtggtcaaacccagacccttcttgctatagtagtttgtcaccccctgctattaaactgccattgacttttagtctcacctgtggtcccatccagacccttcttgctgtgaaatcaagacctatgacctcaaactcctagtcccctctgctgtctaacccaggctcttgctgcacagatgggaggggcaaagccacagaggtagcagactggctgctgccccaaacctctagactcacctgaggtctcactcagatccttttttttttttttttttttttttttttgtatgtgtgtgagacagagtttcactcttgttgcccaggctggagtgcagtggtacaatctcggctcactgcaacctccacctcccaggttcaagcgattctcctgcctcagcctcctgagcagctggaattacaggtgtccaccaccatgcccagctaatttttgtatttttagtagagatggggtttcaccatgttggccaggctgttctcgaactcctgacctcaggtgatccacccacctcggcctcccaaagtgctgggattacaggtgtgagccactgtgcctggccttagatccttttttttaaacagggtcttgctgtgtcgcccagactggggtgtagtggtgcaatcatagctcactgcaactgccaactcctgggttcaagtgatcttcccacctcagcctcccaagtagcttggaactaccggtgtgtgccaccatgcctggctaaattttaaaaaaaattttttctagagacacggtcttgctatgtcgcccacaatgacttcaagtgatcctcctgccttggcccccaccaaagtgcgtggactacaggcataagccactgcacctggcctctctcgcaattctcatagccaatctcagacctcatatattctctgtggtctaatccctcttgccacacaagttgctgaccccggagctgaagctggcagagaagctgccccaatcgtcctgtcacacttatagtatgacccagatctctcttgctagagcagcccccacatctgacttccaaacatctaattctccctgcagtttctcccccagatctatcttgctgcagttgctgaccagtcccacatttgatctcatgcagctctttcttgctgtgaaaatgccctaggctgacccccaagttccagtcctcattgaggtttagcccagaaattttttttttcaattattaaaaaaatatttttttggccgagcgcggtggctcatgcctgtaatctcactgctttgggaggtcgaggtgggtggatcacgaggtcgggtgtctgagaccagcctggccaacatggtaaaaccccgtctctagtaaaaatacaaaaaaattgccgggtgtgatggtgggtgcctgtaagcccagctactcaggaggctgaggcaggagaatctcttgaacctgggaggcagaggttgcagtgagctgagaccgcaccactgcactccagcctgagcaacagatcaagactccgtcttaaaaaaaaaagaaaaaaatatttttcttttctttctttttttttttttttttttgagacggagtctcactctgttgcccaggctggagtgcagtggtgggatctcggctcactgcaacctccgccctctgggttcaagcgattctcctgcctcagcccgccgagtagctggaattacaggcgtctgccactgcgcccagctaattttttgtgtttttagtagagactgggtttcatcatcttggccaggctggtcttgaactcctgacctcgtgatccacccacctcggactcccaaagtgctgggattacaggcgtaagccaccacacccagcctctgttttttgttcttttcactccattcttctggtctgatagatttttctttttgaaacagagtcttgctctgtcacccaggctcaagtgtagtggcatgatcatagttcactgtagcctggacctcccaggctcaaggaattctcctgcctcagcctcccatgtatctgggacaataggcccataccaccgtgcccagctgatttttttttccatgttttataaagaggaggtctcactatgttccccaggctggtctcaaacccctaggctcaagggatcctcccaccacagcctcccaaagtgctggaattacaggtgtgagccacgttgcccaccctagaattttttttcatgtaacagcccccacactgactgccctcacccaacttttcccttaccttcgtctcggccaggtagtcagccgaggacttgagctgccaggggttggcagcgtcagggtgggggttgcgcttgaagaagtggtgggccttgcaggcggcgtgcaacaggtgtggcttgggcaggccctgggtttcgcagatgtagcgcacctggtcgtactcgttgttgccggggtagagaggccagcccaggtgcagctcagccatgacgcagcccagggaccacacgtccaccttctcgcagaagggcagccccagcaggatctcaggggcccggtagaagcgcgactggatgtatggctccttcacgtagcgcacctcgctgaaaatgctggcggatccgaagtcaatcacctgtcgggggtggggaagagggcgagtgggcaggtcaagcagcagggacagccgagctgggccaccccggcatctttcacctggcatcttcctgcatctgctatttgactctggccatctctgggtctgtgattctttagttgctttgttggtttttgtttgtttgtttgtttgtttgtttgagacagagtctcactcttgttgcccagtctggagtgcaatggcacgatctcagcacactgcaacctccacctccccggttcaagcgattctcctgccttagcctcctgagtagctgggattgcaggcgcccaccaccacacccggctaattttttgtatttttagtagagatggggtttcactatgttggccaggctggtctcgaactcctgacctcatgtgacccacccgcctcggcctcccaaagtgctgggattacaggcgtgagccaccgcacccagcctttgttggtttttttttttttttttgagaccgagtctcactctgtcgcccaggctaaagtgcagtggcgcaatcttggctcattgcaacctctgcctcctgggttcaagtgattctccagcctcagtctcctgaatagctgggtctacaggtgcacaccaccatgccctgctaatttttgtatttttagtagagacggggtttcaccctgttggccaggctggtcttaaacttctgacctcagatgatctgccctcctcagcctccctaagtgctggaattacaggcatgagccaccgcacccagctgtggccgtagttgttaagtccctatctctgtctcttccagcctttgtgtctggttcgagtgactgactctgtctctgtttctctccactagaactatgcaaaggagggttaggaccctattcttcctcttgcaccccacaccttgtccatcagccaacagatctagaatctgctccctctgcatgccatccacagccccgaccctggtcctatcctgcatcctttccaacctagaccaacgcgggggtctcctcgctggtctccctgctcctctcctctgccccctagtctgtctgtcacaagcatccagagggatcctgtggccgcccgggatagattgggtcctcccctgctcatagccacatcctgtgacaaaagccaaagtcctcaccgtggcccacaggtctccaatgtctgctctgtcacctctctgccacatctcccactctccccatcactcaccctcctccagccacaagggtctcctcactattccttgaacaagtcagacattcccagctcagggcttttgcactcgctgttccctctgcctggaatgctcttccctgcatgagcacagggctccctgcctcacctccttcaggtctttactcaaatgtcacctttctatcaaaaggtgaaaggcaggacaaaaaaaaatgatcaccttctcagtgagaccttccctaatcattctgtgaaagcatcagccatcagtccccatcctttctatcccccgccaggcccctgtttttctttttcttttcttttcttttttttttttttttttttttttttgagtcggaggtttttgagacagagttttgctcttgtcacccaggctggagtgcaatggtgcaatcttggctcactgcaacctcctcctcccaggttccagtgattctcctgcttcagcctcccaagtagctgggattacaggtgcacaccaccatgcgcagctaatttttatatttttagtagagacggggtttcacgatgatggccaggctggtctcgaactcctgaccgcaggtgatccactcgcctcggcctcccaaagtgctaggacaggcgtgagccaccgcacccaggtccaccattgctcttaatgccatttcacacactatatctcttaattttttattttaattttattttttaattatttatttttttgtgacggagtctcgctctgttggccaggctggagagcagtggtgtgatcttggctcactgcaacctccacctactggattcaagtgattctcctgcctcagcctcctgagtagctgggattacaagcgctaatcttttgcatttttggtagagacaggcggggtttcaccatgttagccaggctggtctcaaactcctgactcagatgatctgcccgcctcagcctcccaaagtgttgggattacaggcgtgagccacggcgcccagcccttttttcctttttagagacagggtcttgctctatcacccaggctggagtacagtggcaccatcgtagctcactgtagccgcgaactccagggctcacaagatcctcccgcctcagcctcctgagtagctgggaccacaggcatgcacctccatacccagctaattttttaactttttgtagagatagagatgggtctcactatgttgcccaggatggctcctgggctcaagtgatcctcctgcctcagcctcccaacatgctgggattataggcatgaggccctgcacctggcctctctcagcatttctctccccagcgaggatgtcagtcccacgagggcaaagaatttatccattttgttcaatactgtatccctagatgcctagaacagggcttggcacacagcaggggctcagtaaataatgagtgaatgaatgaatgtatgtatgggctttgagttccttcattctctttccatctcttgcttgtatctctctctctctgtctctcatttgagacagtggctcaccctgtcacccaggctggaatgcagtggcgcaatctcggctcaaggcaacctccaccttccacgttcaagcgattctcctgcctcagcctcccaagtagctgggactacagtcacatgccaccatgcccagctaatttttgtatttttagtagagatgggttttcaccatgttacccaggctggtcttgaactcctgggctctagtaatcctcccacctcggcctcccaaagtcctgagattctaggcatgagccactgtgcctggccatttgtacctctcgttctttctttgcaactgcctctccatcacttgcctgtctcttgtctctcagtgtctctctctctctttccatctctgtctctgtgtcgtccactaggaagacacctccctgaagtcccggtcctcttctgtcttcctcttcaggcactgttcacactcgtcacaggcctttgacacatgacaggtgcttggccaacagctgcggaaccaacattgcgaatggccgaaagcctttgtctctccccatgcctctggtggagctgtctgccattttcaccctgaatctccgtgactctctcttggcctgtttctttttctttttctttttcaggtggcttcactcttttgtccaagctggagtgcagcggcatgatctcggctcactgcaacctccgcccccatatgggttcaagcgattctcctgcatcagcctcccaagtagctgggattacaggtgcaccccaccacatctggctaagttttgtatttttaatagagacaggatttcaccatgttggccaggctggtcttgagcttctgacctcaggtgatccacctgcctcagcctcccaaagtgctgggattacaggcttgggccaccacacctggccagcctgtttccttctctgagtttttctgcttttcattcagccatttctcagttttttgtttttgttttgtgttgagacagagtcgagctctgtcgcccaggctggagtgcagtggcgtgatctcagctcactgcaaaacctctgcctcccaagttcaagtgagtctcctgcctctgccccccaactaactgggattccaggtatgtgccaccacgcctagctaattttagtttagtttttttttttttttttctgagacagagggacttcctctgtcgcccaggctggagtgcagtggcgtaatctcagctcactgcaacctctgcctcccgggttctaagcgatttatctgcttcagcctctggagtagctaggattacaggtgcccgccaccacacccggctaatttttatacttttagcagagacgaggtttcaccatattggtcaggctggtcttgaactcctgacctcaggtgatccacccgcctcggcctcccaaagtgctgggattacaggcgtgagccaccgcacctggccatccctcacctttcacttgcagaaagcagtatcatgaaatggttattaattgctattctgatcccagagtgccagggcttcagtacccaagaggctgagtgaccctgggcacttagtctatgtttgtggaatgaattcattccttccacagagacagtgggggtgataatgccggccaggtgctgtggatccgtcctgtctgtcccctgctgtgtttgtggaagtccctgcttccctgggtctctgtccttccacctcttggggcagaataatccacctttttctgtctctgtgtctctggcaagcattcatttagcactggctccatgactgcagtgctgggagatgtcagggacacagcgatgattaagtcagccccagccttgccctcagggtgcccctggttcagaagcatccagacagtatcaaactcaaaagcagacagaggactgggcatggtggctcacacttgtaattccagcactttgttgaggccaaggtgggcagattgcttgaactcaggactttgagaccagcctgggcaacatgatgaaatcctgtttctaccaaaaaacacaaaaattggctgggcgtggtggctcacgcctgtaatcccagcactttgggaggctgaggcaggtggatcacaaggtcaggagtttgagaccagcctggccaacatggcgaaactccatctctactaaaaatacaaaaattagccgggcatgggtggcgggcacctgtattcccagctactcaggaggctgaggcaggagaatcgcttgaacccgggaggcggaggcagtgaaccaagatcatgccatcatcaccccgtctctgataagtacaaaaaaaaaattagctgggcgtggtggcgcatccctgtaatcccagcaactcgggaggctgaggcaggataatcacttgaacccaggaggcggagttgcagtgagctgagattgtgccactgcactcaagcctgggtaacagaatgaaactccgtctcaaaaataataataataataattttaaaaaattaaaaaaaaaatctagggctggaagaagctgggaaaaagacaaggaactagggacgcagccaccctagacgacccctactcaccttgaccctgaaggggcagcgggtctggtccaccagcatgatgttctcaggcttgagatcagcgtggatgatagccagctccttgagccgggccagggctgtgagcacctgcagggtgactgtacggatgtggcgggcggggaggggcgcgaagttgttctccttctggaactcgaaaaggttttgctccagcagctcaaagaccaggtagaacttgagggcgtcatggaagaactcaaggaagcggatgacgtgggcctcttcagggtctaggcctcgcatgcagtgcagcagcttcagctcgttcttgatgatgcggttgcggtaggcgtcattcttgaggatcttgatggccaccatctcgcccgtgctccgccgccagcccttggctacctccccgaaggtccccttgcccaagacctcgatgatgtcgtagcagtcagtctccgactggatggtggacatggtgccgctgctgccagacaccgccctgcccaggcccctgtaccactggctctgccgcccaggcctcccgcctggctgctgacacagcaggccccccagtgggggaaagagaaccgcactcgtgtctcctcctatgaggttggcccctgcttccctggcacccccaaacccccaggccacactgtcagtctgccaggggctgcacccctccccagaaaccctcctggcttgggatgaggggccccaggccccaccgaatgggttccagcgctgttgagtggctctggttctgttgttggagacctgagccctggctggagtgggggtggggtaccaggctgggccccctcccccgcccagtggcggaatcttgcaaagaccaaacaggtgaagtgttgacagaggggggtctaatcgtgggccttgggcatacaggaatggggataaggcaggagtgaggaaaggtgggcttcttgagcttgggagatgtgatgtgtgtgtgtctgtgttcagaaaactcctgtcccagtctgtggctactgtggggtgaggttgtaaaaggccctgaatgccaggctaaggagtttggattctgttctgagggcactggggagccacagaagggctttgagcaggggagggcagggtcagatatgagtgtcagaaagttactgtatgaaaagggataggttggagcgggtaagagtggaagccccaagccagggaaagagtccaggacagggcacagatgggagaggttggggaggagagggcgaggccaatggatgagacactcaaaaggccaggagaagcagccgtgagaccgacggtttgagggaaaggcgggagctgtctaagaacgggcctagggctctgggatgaaggggcagtccccgagaaatggacatggataagaagcagcttgggggagatgttgaggccaaattagaaaatgtatttatttttggctgggtgcggtgggtcacgcctgtaatcccagcactttgggaggccaaggaaggcagatcataaggtcaggagatcgagaccatcctggctaacacggtgaaactctgtctctactaaaaatactaaaaattagccaggcatagtggagggcgcctgtagtcccagctactcgggaggctaaggcagaagaatagcttgaacccgggaggtggaggttgcagtgagccgagattgcaccactgcactccagcctgggtgacagagcgagactccatctcaaaaaaaaaaaaaaagtgttcatttttatttatctttttaattttttgtagaaatggggtctcactatgttgtccaggctggtctcaagtgatcctcctggcctcaagtgatcctcctgcctcaaccttccaaagtgctgggattgtagacatgagccaccactccagccagattagaatatttaacagcgggccgggctcggtggctcatgcctgtaatcccagcactttgggaggctgaggcaggtggatcacctgaggtcgggagttcgagaccagcctgaccaacatggagaaaccccgtctctactaaaaatacaaaattagccgggtgtgttagcacatgcctgtagtcccagctactcaagaggctgaggtcggcaggctgaggtatgagaactgcttgaacgcgggaggtggggttgcagtgagccaagattgcgccattgcactccagcctgggcaacaagagtgaaactccgtctcaaaaaaaaaaaaaaaagtaaaagaaaatgtaacatcaaaacatttaaacaaggatgaagttctttagaagtcttatctgatccttacaacatacaaagtagggattttatggaagagaaaatcaaggcacaaagaagtttttaaagtgcctggccaggagtggtggcttacgcctgtaatcccagcactttgagaggccaaggtgggcggatcacctgaggtcaggagtttgagaccagccttgccaacatgacaaaacctcaactccactaaaaatacaaaaattagctgggcatggtggtatacacctgtagttccagctacttgggaggctgagatcgggaggctgaggtatgagaatcgcttgaacctggaaggcggaggttgctgtgagccaagattgcaccactgcactccagcatgggcaacagagtgagactctgtctcaaaaaataaaaataaataaataaatgataaaataaaatgcctaaggtcactcaagtgactgccagagacagcctctgaccctaagcagcctggctccagcgccaaactctgaaccaccacccacacaacctcctaaaaaccaggagacctctggagaaggggtgcagaagctgctgggtccccaaggggatgcaggagagagtttgggagttgtcagcacagagaggaggcgtggaagccatgggggagggtgatgcaccctagggagggtgtgggggtggacaagggcccgggaggaacctccggtgcccaaggagcacggggagagagaggtgtggggaagaggagcaagtgtcaggaagatcgaaggggccttgaagagtcaggacaagagagacaaaggaaaccctcaggcgtggccacggggaggtcactgctgacacagacaaggtaggaggaaaaccccaaatgctggggtcttggaaatgggggtgcactgtgagtgtagataactcctgccatgtttggtgggggcaaagaaaaagtgtgtggtgagacagtgacctgaggagggctggctggaagggacaaggtactcaagtgagtgggggattctgccaggcccctcatccactgagacaggatagggagatgtgaggagagtggggggctgtcggggcgagacttgggactggatattgagtctccttagtccagtgtgggacatcacagagagacatggaggaggctggaggccctgctgggagcctcaggacttagatcctgaattgggatggcagggatggatggcccatggcccctgggagctgagaccagcactgacaggtgctgaggaccctgggacctagttccaagaggcggctgtgtttctggggtagaggctttgaggggaccaggagcagccttcctgggtggggccagagtggacagggcagtcaaaccagccagacaggaaagagaaggccaggatgtgcagaagtgccctcaccggcagagggcaggtggggagcaaccagcctggtaggagtgggtcccccaggacaggcaggcttcctggcagaggggtcccgaagctgtgctctgccagggaacatcccagagtcctctttaacaacccctgggaattctcaagggctagggacgtctcccttcccaccacggcctgtcccaaggccatcctgagtctttgtttttgtttttgttgaaacagtctggctctgttgcctaggctggagtgcaggggcaccatcaaggctcactgcagcctcgacctcccgggctcaagtgatcctcccacctcagccccccgagtagctgggattacaggcacgggccaccatgcctggatattttttgtattttttgtagggatgaggtttccctatgtttcccaggctggtcttaaactcctgggctcaagcagtcctcctgctttggcctcccaagtgctgggcttacaggcatgagccactgcgcccaacccgccctgactcttctcagaccaggtatgaccggtttctcccctcacaccagaggttcccctcaggccaggctcaggcgacccctagaacctcctctttggagactgccttctctgcatctcccctatacccactcctgcccctccctgccccctatgcacacagaggagacaaatacatggctacttccagattattttattcacatggcttggtggggtacaggcactcctgccagagagacaggagcaggcctccctgccagccctggtcagtcacccacctcccggccctcttagggttagtgctagttatcacacacacaacagcgagggggtagagaaaggaaggcaagaagggatccccatctgactaggggcttcagacagccgcagcctgagccccctccatcctggccgggcctggagcccctgtctctgaaaaccccacgctgggcagccgcacccgcaatccaccctcttcctggtccccactcccactccgggccttggggcttagggacaccctggggaagcggaacttgggtgacttctctctgacgggggacttgggggctgcatcgccctcctgcccccgagaggctttagaaggggccgccaggcctacacgtggcaagcggacccggacccggccccggcgacccgaggccccttccccactgccctcttcctcctcctcctcctcctcctcggggctgggggacccttccccagtgaccatctcactttggctgaagcccactcggggcagcctgagtttggggctcttggccttctcaccctcctcggccccctccttggcccgcaccaggccaaaccggggcagccgtaccttgagcttgtgtccggcctctccctccccctctgccacctggtactcggcatggttgcccccggatggcgagagctccacgtcgggcagtgagaggcagaaggtacgctcggcccctgggggctgctcctcagcaccctcgccccccaccctagctctggcccccagtgtgggcaacttcagcctcagcccaccctcgcctgtggccgcctcgcccgcctgtgcctctcggcttagccccacgtccagctcaagctggggcactgtcacggtgggcatcttaaagacaccctcacccaccagcagctcaccacctgcaacctgggctccaggcagagacagggtcacctggggcacctgaaccctgtagcctgctgtgccctctgctgaagggactgtactctgagcctgctgccctggggtacctgcctccccaaagccggtcagctccacctgtggcagggagatgcccagcggaggcatcctcagccccgcgtcatggccctcagtgaccacctgcccggctgtggacaccttcaggcctgacagctgcattccactgacggccacagccccctctgccctcccttcctcctgggcgcccagcgtgaccagctccacctcggggatcttaagctgcacagcggtggactcagccttttcccccgggctggcacgatcaccttgaacttctgcttccttccctcgagccagcccaaaggaaggcatcttcagcttgggcatcttcaccctcccatcccagccccagcccttgccctccaactcagccacccctggcactagttctgctgcctcagtgtcccggcctctgaccccaaacttggggagagcaaacctgggccccttgaacttgaggtcggcccctgccacctctaccttgcctgagggcaggtgggcatccaggctgagctgtgggatggacagatcgagggcaggcagcaggcctgcctccccagcccctttggcctcagcctcagcccccacccgagccttggggagtgagatggcaaatttggataccttcagcttggtagctcgcccagccccctcagcctctgccttagccacctttggccccgagagtccaaacttaggtaaggagaacttggaagagggcttgacttttgtctctatcatctccagccgcccttcctcaatttccacggcgggcagctgtggggtgacaatttcaacagagggcactcggaagcccacttccctgacccctgctgccacctcagggccctccacccgctctcccttgcccattttagcggctgggacctgcccctgcaggccaagtgctcctggcaggtctagctccactgaaggcagagtgagagaggggacacccacatgagcctcaccatccacctctggctgcagacagggaagtgttaccagcttccctgagacctcagcacccgcctcgcctggcttgccacgtgatggggactctgccctccctagcttgggcatggtcatcttgggcatcttgaagccaaattccatcccttctgcctgttctgccttggtggcctttagctgcacctccggagccctgggcagcttcacctctggtgccttcggaagatgcacgtcgggaaccttcggcacttgcatttccggcagccgaatctctgacactttcggcagctgcacctcggggaggtgcacatcgggcacagccatctcaggcaccttggggagttttatctctgggagcttcatgtcagggactttcatttcacagactttgggcagctgcacctctgggaggtgcacatcgggcacggccatttcaggcaccttggggagtttcatctctgagacttttggcagctgcacctcggggagtcgaacctctggcacagccatctcaggcattttagggagtttcatctctgggactttcgggagctgcacttccgggaggtgcacatcgggcacagccatctcgggcaccttcgggagtttcacctcagggagtttcatctcagggagcttcatctctgggacttttggaagctgcacttctgggaggtgcacatcgggcacggccatctcgggcaccttcgggagttgcacttcagggagtttcatctcaggaagtttcatctcaggcacctttggaagcttcatctcagggactttcatctctggcactttcggcagctgcacctctggaagccgcacctctggcacagccacctctgacacctctgggagtttcatctctgacactttcggcagctgtacctctggaagccgcacctccggcacagccatctctggcacctttgggagtttcatctccgacactttcagcagctgtacctctggaagccgcacctccggcacagccatctctggcacctttgggagtttcatctctgacactttgggcagctctacctctggaagccgcacctccggcacagccatctctggcacctttgggagtttcatctctgacaccttggggagctccacctctgggagtcgaacctctggaagggctgcctcgggcacttttggaagcttgacctcaggagccttggggagcttcacttcaggtcccttgggcaccttgacctcgggccctgacactccgatgccaagggagggcatcttgatggtgggcagcttcagcttgctctctacaacttcaggagcagcgggccggggctccaagagggaaagcccaaaggtgggcattcgaagtctgggacctttcaccctggcctcagggctgaccttggctaccttggcctcagcaacttcctttgctcgagccccaaatcggggaaaactaaggcggggcatcttcagggccacctcaggtgcctctccccgggcctccacctctgcacccggcaaggccaggtccacccccacagtcggtgctgccacatccagggtgggcaccactaccgacacagccccttcccgggtctctaggcagggaagtgtgggcagagtgggcagtgagggcaaggcaggcagctccacctgggggacctggattcccacggctggggcctccacagcaggcggagccggggctccgagcccaagggttggcaggtggagggcaaagccaccagctgcctctgctgagggggcagccttgggggctgagacctgggggacacccacctccgcccctggcagccgcggcccaaccagctccacctgaggggctgtgaaacgagctcctgcagccacctcagcctccaccttggctttcctggggggaggagcggcggcggccagccgggctgcctgagcctcttcggccacttctcgtacacgcagccgaggcagctggaggcgccggcgggcaggggcagccgggacaggacccttgacagcctcggctttgaggccccgacgcaggcgggagaacttgggaaaggagaactcgacgtcaacaggggccaggtcagcggggacccccagagccccaggcaccatcttcttcttcttcacaggggacagactctggatgttctggggagagaggagagaggcaggaggcggtgggacagtgggaggctgggagtggacaggaagagccccacctggtattggaccaggcgggggatgtgctgggtcaagtatcttgttccccaaacatcatccccacttcttgcctgtcatttcaccatgagtgcccaggaaagcaggcagccatctaggatctccaaatgagtcaacaggagtgtagggacggggacccaagacttctagatcctgatccgggattttccccaacatcctcattctagagatggggaaactgaggcccagggagagaaacaactttgtccagggccactcagcagtaattgggccagcactcaggctggaatctggctttcctggttcgaagtagcctggttcaggacccctagcaagcctggatccgatggtggggacgcctctccgaggtgggtgagggccctgggctggggtgggtctgtcccccttcccggggaagagtttggggcagagaggaaggggcagagggtggaattagcttgggttagtgacaagacagagggcaaggctggcccacgatggcggggaatggggctcacggcgcagagaccggatcgctggggcagtccagggccggggccgggctaagcacgcgtaccagcttggccaccttggcccgcgggcccttgatctcgtagccagacacggtcccgggccgcagagccaggtccccggtgggcacagtgcgcttcaggcagaaggagactttgtaaggctcggcgcattgcagcaggcgtagtgcgtcctcgtacttgaagttctcgaagaacactcgggcactcagcagctggtcccctgcgggcgaggtggaggtgcgcagcacgtgggcatctcccggctccgcccgggcctagttctgcccacttgcacggagccctcgcggtgaggacccgccccaaattttagtttctccaatccccagcgcaggattaagtcgcagttacgctagtccccgccccatgaccttatccccgccccctgcaatgaacaaagccgcgcccactcaggccacgcccgcaccttgtcgctcccctacccatccttacgtttcagatactgactttgcttcttttaccgagagaacagaatcagaagggaacttccagaatctcccacactgtgtgttcaccccctttctcctgcggcgacttactccattcgccttcctgttcctggggatgaactaaccccactcctagctcagggcaatctctccaccgccttctcagggacatcctccagcaattctctcctcttcccacgtcatcagttgtccttctcgtctacattattcccatcagcatacaaacatattattatttctcgcataagaaaggttgtcatggcctcactcccccggagctcctgccccatttatctgttcaccttaataggcaaaaggtattgagttctccagtggcattgttaccagttctccagtcacacctctgaccctgctttccaacacgcacatctgaactgctcctctcaaggttccaggcagtgacctctgtatagtaagtccaagggtcaagtcccaggcctcatctgcttaaaccactcagcatctgatctaacctcactctctgtcatatccttgcttcccttggcttccaaggtgctacaccctctggagcgtctctgggagttccttgtcagtctccatagatgtttgctttccctctccctgatttctttctttcttttctaaacagtctcactatgttgcccagtccaatctcaaattcctaggctcaactgatcctcccaccccagcctcccaaaatgctgatattacaggcgtgagccactacacccagctttctttcctttctttctttctttctttctttctttctttctttctttctttctttctttctttttctttctttctttctttcacccagctttctttcctttctttctctttctttctttctgtctgtctgtctttcttttcttttcttttcttttttagatggagttttgctcttgttgcccaggctggagtgcaatggcgcgatcttggctcactgcaacctctgcctcccgggttcaagcgaccctcctgcctcagcctcctgagtagctgggaccacaggcatgcaccaccacacccagctaattttgtatttttagtagagacggggtttctccatgttggtcaggctggtctcgaactcccgacgtcaggtgatctgcccgccttggcctcctaaagtgctggcattacaggcgtgagccaccgtgcccagcccctcctcttttttttttaagacaagatctcgccaggtgcggtggctcatgcctgtaatcccagcactttgggaggccgaggcaggtggatcacctgaggtcgggagttcgagaccagcctgaccaatatggagaaaccctgtctctactaaaaatacaaaattggccaggcatgttggcacatgtctgtaatcccagctactagggaggccgaggcaggagaatcacttgaacccgggaggcggaggttgcggtgagctgagatcgtgccattgcactccagcctgggcaacaagagcgaaattccatctcaaaaaaaaaaaaaaaaaaaaaaaaaagacaagatctcactcttcacccaggctgtggtacactggtgcaatgacaaatcactgcagccttgaacttccaggctccagcgatcctcctgcaaatgcaggcccgtgccaccacacccagcctctctggcctcttaaagacacactaccccagacctcaggacttggacctcctctctgtctacatgctcaagtcaccccttgggaattcttgggaagttcatccagattgagaagttaaaagaccataaatctgctaacaattcccaagtatatctctccagtccagcactctcccctccaccctagactcacatccaacatctccatcatatctccacctgggtgtcccacaccacacctctcctttaacagatccaaactgtactcctggtctttcttagtactagcctcagtgtgctccttttgagggaccagcaactccatcctcaggtcaaaaatccccagatccatcctggacaaccctctttccatcatacccaatatccagtcctcaaagctcctccttcaaaatatattcagaatccaaatatatatatacctccaaaaccctttggtcctgagcatcctcatctcttacctggataatcacagtagccagtttgttgatctccctgctcctaaacctgccttcatatattctactgtttgttgttgttggccttgtttttgaaacagaatcttgctctgttgcccaagctggagtgcagtggtgtgatcatggctcattgcagcttcagtctcctgggctcaagcgatcctcccgccttggcttccccgagtgctgggattacaggtgtgagccacccaatgcttggccatactctactgttaatgcagcagttcagcacagtcaattcacgtttctccctgctcacagccctcacagaataaaagccaaagtcttataaagccctctaaaaagtgtcctccccttacctctctggccttctctcttactctcctcttcactaactcaattgcgtagacactggcttcctcactgtttctaccacaagctaggcatggtcccaccttggggcatttttgctgtctgttccctcttccagatggcctcatagcttgttcccttacctcctttagccttttcaccctttccagcccacccctttttttttttttttttaggcggagttttgctctttcgcccaggctggagtgaagtggcgcgaactcggcttactgcaaccttaagcaattctcctgcctcagtctcctgagtagctgggattataggcgcctaccaccacacccggctaatttttgaatttttagtagagacagagtttcgccatattggccaggctggcctcgaactcctgacctcaggtgatcagcccacctcagcctcccaaagtgctaggattatgcacccagccaagcccacccccatttaaaaatgcagctgtaggccggcctcggtggctcacgcctgtaatcccagcactttgggaggccgaggagggcggatcacgaggtcagaagatggagaccatcctggctaacacggtgaaaccccgtctctactaaaaatacaaaaaaaattagccgggcatggtggcgggtgcctgtagtcccagttactagggaggctgaggcaggagaatggcgtgaacacgggaggcggagcttgcagtgagccgagatcgtgccactgcactccagcctgggagacagagcaagactccgtctcaaaataaataaataaataaaataaaataaaataataaaaatgcagctgtagcacattgtcctcctggcaactgtagcacttactgctttctaatttactaggtattttacttaatttgcttaaatatgtctctcccggctgggcgcggtggctcacacctgtaatcccagcactttgggaggccgaggcgggcagatcacgaggtcaggagatcgagaccatcctggctaacacggtgaaacctcgtctctactaaaaatacaaaaaattagccgggcgtggttgtgggcgcctgtagtccctcccagctactagggaggctgaggcaggagaatggtgtgaacccgggaggcggagcttgcagtgagccgagattgcgccactgcactccagcctgggcaacagagcgagactccgtctcaaaaaaaaaaaaaaatctctccccactggaatgtaagctccataagtgcagggactgttgttcagttttgttcacggctgaagcccaagcagctaagataatgtctgacatagggtggggcacggtggctcacgcctgtaatcccagcactttgggagactgaggcggatggatcacctgaggtcgggagttcgataccagcctggccaacatagtgaaaccccgtctctactaaaaatacaaaaattagccgggcgtggtggaggggacctgtaatcccagctactcaggaggctgaggcaggagaatcgcttgaaccagggaggcggaggtggcagtgagccgagatcgtgccattgcactccagcctgggcaacaagagagaaactccgtatcaaaatacataaataaataaagtctgaaatagaaggcactaataaatagttgttgcatgaataaatcacgtcagcttcatccatatcctaaaacatcctttactcttcccaacccctctaagtggctcactccacccttttctcctgccccaacaacaaaaacatttactagcactcacatagttaagcactatgtgccacttagctatgtgctaagtgttttcacatactgactcgttaaatcctcaatacataataaccccatactagaataagtcccatttcagagatgagaaaactgaggcacagaaagatcacaagctagtaaacgggggatgtgaaattcgcacccagacagtgaacctccggaatttgctgtgaacagtcagcaaagccccgccccaagcccttaacccctcctggtcgccggtcacgcccccatcccccggtcagtttcagcctctctttggacccaaggcagattcctaaccccgcccccgcagttcgaccccgccccacaccccgggcccgcccaccttcctgcaggctgaggctcctggcggcgggtgagtcctcgcgcagctcccgaacgaagattccctctttgccgccgcccgctacgttgatgccgctgaccccggtctgcgcctccgtctccacgataatttccaccaactccgcccgcctcagctcctgcagagggcggcgaggtgtcgcgttggggctctagggccggacctcgcccagagcccgccattgcgctcaacagtggctcatatacatatatatgtttatatatatttagagacgggggtgggggacggtctcgccacactgcccaggctggtctcgaactcctcctgggcccaagggatcctcccgcctcggcctcccaaagtgctgggattacaggcgtgagccaccgcgcccggccaaaagcggctgttcagcgggccttcagggcacacgcccctcggcgctgccctcgcaggacgtcggggcacacccactccggcgtctcccctttaagcaagcctgagggcagctggctttctaggacccgcggaacggttaaacagctccgcgggccggctggcctctccgaggccctggagcggcagccgaaaggggttaggggaggagacggggttgtaaggggagggactgcgtcggagtgggctggagataacttgagttgtgattgagaggcgggaccaggatcgtgggggcgtggtcaggtcgggagggcggggctggggggggttggtgcgggtaggaggggtaagacaacacaggcctgagaggaagagccaaatggggtatagaagggtgcaaaagataggagaggaatgtggccagagtttatgggaggttatttggagctggggcggagacccttattatttttttgttgggggagacagggtctctcactctgtccccaggcttgagtgcagtggtgtgatcatggctcactgcagcctccacctccttaaactcaagcagaccttccgctccggtctcccaagtagttgggaacataggcacgcgccaccacgcccagctaatttttaattttttttttaagagacaggggtatcactgtgttgcccaggctggtctcaaactcctggcctcaagagatcctcctgtctcagcctcccaaagcactgggattacaggcatgagccactgcatctggcccggagacccatattctacaaactgaatttaactatgggggaggggctttaattacagcagaacaagagaatagttgaggatgggattctgaggaaggggctggctggaccttcaagccctctgggattggggggacagggagtgggatttgcctccctgcaggcttgaatgtgtgtgagaatgtgctctattgtaaattcaatgacccgaagacctgtgaaacgcccacaggagagggaatccagtgaagggggtctgcgtgggtaatgaatgggactgggagacatggcattcccggtatttactgtaaatgatgcagattggacctggcccagaagccactatgggattcacaatagggcttcccagaagaggcagtgacaaacctggatcctgtctaggaatccaatctgctgtgtgtcttaggaagaatcttgccctctctggacccacttccctgctgcaaaatagggtaacataggcatactggaaggaggttgcagtagggatctgagaggacactgtcatggccaacgcactggggccagcacggactggaattgagcccaggacttggagggagagcaggtctaggccagatgccccacagcagtggccccaagggactagggggctgagcagggcagtctgggtaaggagagttgtggctgggactgtagggaacagcatgaccaccagtaccgccctttggctcagcaggccctgggctcagcattttatgtgcagaatctcttttttttttttttttttttttttttttttgaggcggagtctcgctctgtcacccaggctgggagtgcagtggcacaatcttggctcactgcaacctccacctcccgggtcaagcgattctcctgcctcagcctcccgagtagctgggattacaggtgcacgccaccacgcccagctaatttttgtattcttagtagagatagagtttcaccatgttggccaggatggtctcgatctcttgacttcatgatccacccgcctcagcttcccagagtgctgagatgacaggcatgagccaccgcgcccggcctcttttttttttttaagagtcggagtcaggccaggcgcggtagctcacacctataatcccagcactttgggaggccaaggcgggaggatcacctgaggtcaggagttcaagaccagcctggccaacatggcgaaactccatctctactaaaagtcctaaaattagccaggcgtggtggtgggcgcctgtaatcccagctactcgggagactgaggcaggagaattgcttgaacctgggaggcggaggttgcagtgagctgagatcgcaccactgcactccagcctgggtgacaagaccaagaatccgtctcaaaaaaaaaaaaaaaaagagtcggagtcttgttttgcccaggctggtctccagctcctgggctcaagggatcctctggcctcagcctcccagagtgttgggattacaggtgtgagccatcgaatgcagtctgcaggatctcatttcatcctctccctatagccttgggcagtcacagaggaggacactaaggcccagagaggtaaagtgacttgcctaatgccctgtagcaagttaagcggctgggcctcaaccttaggtctgtgaccccagaactcataggccatcctgtgggcagagaactcctggcgctgtacccactgcctctcgcccccagtagcagcttggcccctgtaacagtagacccgctctgtgcctggtatacagtaagacatggtcaatgccaatccaccatctcagtaacagtgacagcagctgtcattcaaagaggcttcctcagcaccagactctgtgcaaatggctcaagcgggagttctcagaggtggagatcattacctccatttcttttttttttttttttttttgagacagagtctcactgtgaccctcaggctggcatgcaatggtgtgatctcggctcactgccacctccgcttcctgggttcaagcaattcttctgcctcagcctcccgagtagctgggactacaggtgtgcaccatcatgcccggctaatttttgtatttttagcagagatggggtttcaccgtattggccaggctggtcccgaactcctaacctcaagtgatccgcccgccttggcctcccgaagtgctgggattataggtgtgagccactgcgcccagccccattacctccatttcagtgggaaactgaggctgaaagaggtgagatcatctgcccagggccacacagctgaagtggtagggttgggatttgagccatgggtccaagcccatgtccttaactcctacattatatgcccttgtgtgtgtgtgtgtgtgtgtgtgtgtgtgtgtgtgtgtgtttagacagggtctttttttttttttctttgtttttctcatttattctttccacacaggagacttaatgagacaggatcttgctctttcacccaggctggcgtgcagtggttcaatcatatctcactgcaacctcaacctcctgggttcaggtgatcctcccacctcagcctcctgagtagctgggactacaggaatgcaccaccaaacccggctcatttttttttccggtagagacagggtcttcctatgttgcccaggcttgtctcaaactcctaggctttagcgatcctcctgcctcggcctcccaaagtgctggaattccaggcctgcgccactgcacctggcatatgctgcctcttctgatgaagggtttctgccggattttcttcagctccttattaatttagctcctttgtgcgccagtgatttcactgccttgagtcttagcctgtgccagatgctgcactaaggacattacatatgttaattttcttctcctcacagtgacccataaaatagaccctgttattatttccatttcacagatggagagaatgaggcacagagaggccagaaagtgtctccttgctgccctagtctgtgcctccccattgccctcaagtgcgccttgcaggacacgtgggcactcacctcggcactccggctcctggcctccatggcgttgctgggaggcacctgcaccccaggctcctgtgtcctctcccctttctgctgcagaaccagcttcagttctgcatggagcagctgcctctgagcctgtgggaggacagcagtggaggcttgaggccagtaggggacgagaggtggaggccatgcttacagggagaaagcagggtgggtattagaaggggagaagggcccccaccccagctgtcctctcaccgctgcctgggtgcaggcacttcctcctaacaggagcccagcccgaggtgccgcacagctgtctgcagggctcacgcccttccgtggggttcttgctgcctgccagggaaaggccaggatgtgaagctccaggcaggcgaggaaggggtggggaggggcatatggcaccagcctgcgctcacctgagggtcacctccagctccttgggcctcctgggtccggcgctctaagaagaataatgtgagcagtgttattggctaacagccaccgatgacttcctgagtgcctgaccctgctgcgttctgctgataccctatccccgtcgtgcaggtgggaaactgagcctcagaagacctttacccaggatgactcagctggacaacacacggtaaagccaaaactgactccgaggcctgtctggcagcagagcccccgtgccaaagatcttggccaactgagggggccaaattcactaaaaaataattgctatttgagacagggtctagctctattgcccaggctggagtgcagtggtgcaatcacggcacactgctgcctcggtctctgggctcaggcgatcctcccaccttggcctcccgagtagctgggaccacaggtgcatgccacaacacccggctacgtttttgttgttgttggtggtgtgtgtgtgtgtgtgtgtgtgtgtgtgtgagagagagagttttgctctgtcacctaggctggagtgcaatggcgcgatcttggctcactgcagcctccaactcctgggttcaagtgattctcccgcctcagcctcccgagtagttgggactacaggcacgcaccttgggactacaggtacgcaccgccatacccggctatttcttgtatttttagtagagacggagtttcaccatgctggccaggctggtcttgaactcctgactgcaagtgatcagcccaccttggcctcccaaagtgctggaattacaggcatgagcctccacacctggcaacaccaggttaattttttaaattaatttgtagagatggagtctccctaggttgcccaaactgagctccaactcctgggctcatgctatcctcctgcctcagcctcttgatgctataaaataattatagccactcccatgtactcccagtgagcaaatcacagctcctctctgtgcttcagttatgttgtctataaaatgtggagaataagagcttttacctcgcagggctgttccgaggctcaaatgagttaataagtgtaaagtgccaggcacctggcaggtgctttataaatacttgctattattattattattattattattattattattattttgagacagagtctcgctctgttgtccaagctggagtgaagtggtgcgaattcggcttactacaacctctgcctcctgggttcaagtgattctcctgcctcagcctcccaagtagctgggattacaggtgcccaccaccacgcctggctactttttgtatttttagtagagatggggtttcaccatgttggcaggctggtctggaactcctgacctcaggtgatccacctgcctcagcctcccaaagtgctgggattacaggcatgagccactgcacctgtcaggccattattattactaagaacttcctatggccctgaccttgtgtcgagcgccccacatgctccactgcacatggccctcagcacagccttgtgcaatcagctactactgagcccattacagaggagacacctgaggctgggggaagggatgtcactagcccaggtcacaaatggtcgagccaggacttgaatttgtctgaaggctccagccctttatctgggtagtaataatacctgatgggtactgagtgattagtatttgctggcccccgtgctaagaccttcaccttctacttcacctcggaaaaccccatttcctgagaggccaaaagaacttgctcaaggcctcatagcacagccagaaggaggcaaagctgaaattcacatgcagccacccgccaggcccatctggggaaatggagatgaatactctctcccccaacccccgactctgggcttgtcctcacagcccccacctggcatgccaacccgccaacccctattgcacagggaaaggtcaggcctcacgcggcacattccctcacacaatggcccgtctgctgtgctcagttgcattccgcccctgcccacccaccctggccacacaatggcctttcatagcccatcagtggccaggagagaggacatggggaccccttaacactcccacagcacccacgccccccacagtgtaagagggcttctctctgcatctcctagggggtcctggtctctgtggccttccctgggatcccctgtgagccccctacaccttccaggctgtgccaggacttgaacttgtctaaaaactccagcacgggctgggcgcgtggcttaggcctgtaatcccaacactttaggaggccgaggtgggtggatcacgaggtcaggggttcgagaccagtctggccaatatggtgaaaccccgtttctactaaaaatactaaaattagccaggcgtggcagcgcgcgcctgtaatcccagctactcgggaggctgaggcaggagaatcgcttcagcctgggaagcggaggttgtggtgagctgagaatgcaccactgcactccagcctgtgcgatagagcgagactccatctcaaaaaaataaaaataaaaataaaaaaagctccagcgctttagctggacaatcataataacaactgatgggtattgagtggttagtattaatattagctggtccctgcactaagaccttgtctgccatgtctggggcatttcctctgaattgggccctgtgctagcacccacaggcctcaaaatcaccctagatgttgtggctgttatggggtggaaactgaggctcacagaggggtcacccagccagaaaggggcagagctaggacccgtgcctgcccttcacccctgcttcaccttaatttgcattggtggctctgcgcactggggcaggagctgggttgggcaggagggggccaacggtgctagaaacacacccaggccaggtgccgggcctggaccgggcaggcgctttacatacttgaccttgtgggaccccatttaactgatgagtcaatgagagttaagagaccggtgatcacagtgacagagtcgagacttgagcccaggtgtgaaagcgaactcagttcccttacccaggactgatacacagcacagagtcctgagctggggacacgagaagcctgaaccttgtaggtggtagtagagggggtctcctgggtcatcagctctctgtcccaggcccgtggctgtgagggtcatgcccggagcctggcacaggaagttcaggcggggcagggacaagagagagtgccctccttcttcgtccctgcctggacaggcacccagcccaggttatatttagcccaactgtgctcttcctgagccacgtacccagcccctggggtaaggtgggggcagcttcggaaggaaacccacagagaggactctgtgttcccagctctgcctatcccactaggcaggggaaagaggggtggggaggctcctggggagggtccctgccttgtgttagaggcagatccactgggaccaggcagacactccagatgccagcagcctatttcttgggtagttactgtggcatgaccctggcatatgccagaactttcagaatccccagggtccccatttcttgagcacctactgtgtgctaagatccttcctgtcttggctccttaaatctttgtaacatctccctggagtgggtacaactgagatatccatttcagatgcgacttatgcccttcagagcagctgggagcgaggggttgtcattcggaggctgctgagggatcggctgagggcattgcccttctggccctctttccctggtgactgccaccaacttcacttgggaaccctgcctgctcagagcctcagctttcccccgccaccagcgtgatctctcatagcaatgggggtcaggggttgggctgactcatccagacctctaaacattatctgaggccacctagggggtcagggggagttaaggcagtggcctctggctgcctcggttagtccctgctccagcacttcccaggtgtgaggacttgggcaagatccttcatctctggggcctcagtttctccatctgtaaaatggagccaataagaaaggctttgaagatttgtgagagaacagcaggtgcttagaatatccctcctgtatagtaaatgcttgattaatataaactcgtctctgacagcaacagggagagtatggagggagggagctgtgcttctcacagtgttgcacatccaacctttgctcctcagtggcccccactttctctgctaccaaaggggagctttggctgagagacaaaacccagctcaggcaccagcctcccaacaggatccatgctgcctccctagcaccctactccagggacccaccccaggcctcctgccccagctctggtgtttgttagtttgttttttggagacagggtctccctctgtcactgagactggagtgcagaggtgtgatcacggctcactgcagccccaacctcctgggcccaacccaatctcccatctcagcctccagagtagctggaaccacaggcatgcaccaccatgcccagctaattaaaaaaaatttttttttgttttgtagagatgggggcctctctatgtggcccaggctggtctcgaactcctgggcttaagcagtcctgccgcctcagcctcccaaagtgctgggattataggcatgagccaccatgcctggctgccctagctctttaaaagcagcaactcatttactcggcaccagccctgtgaggtggcctccagacatcagcccattttagagatggggaaacagaggcacaaaggatgaagtatcttgcccaaggctgcacagccagaaaggagaggaaaggggatttgaaccaccagctccaaagtctatacctttaacacctacaccacacggcttcctgagcccccaggccccctcccagcacctcccgggaccctgaacctcattcccacagtgtctcagcctggccagggaagggaccggccggctgatctcttaccgctgagcctccagacacctcgagagctcctggtcccgtctgtcagccctagccctaggctgggggggaaaaggaatggggaggggggaggagagagagaccccagccattggctgcgggggtgtgacgtcaccagagggtgggtggtggagaaacaaacatccccctcctccagctacatctatccccaaggggtgggggccacgggacagccaccagccgcctctctcttgcctgggccgagatctctgccatgagctcagcttcaaggatttgcacgttggcttcctcgacttggagaatcaggaccccaccccagccccactgtttcctggctccaggacccgggcctggccaactgcctctactgtaaactcctttcactccctctccctgtcaacttgggttcaaatcgcagcgcgaccacttcctcgctgggtgacctgctgccagtcacagcttctctttgcggatagtaagagtacccaccttatggggctgtggtgaagattaaacgagttaaaagagactgaaaatgtaagacaatgccgggcacataatgagggttactaataagtatttggtattatttttcacacaaattaggtggctggctcatcttgctggggggttttggccccttttcagtaaggctgggcacaggggacccccagttctctgtctaatggagttactgtttagggggacacctatcacatactaagtaccatgctcagtgctgaagccctgcttttgaatcaagggtgtaaaatgggctccttatgctccccacccttttttttgagacaaggtctcactctgttgcccaggctggagtgcagtggtgtgatcatggctcactgcagcctccacctcctgggctcaagcaatcctcccgactgagccccctcaaatagctgggaccacaggtatgcatcatcatgcccagctaatttttgtattttttgtaatggcaaagtttcaccatgttgcccaggctggtctcgaactcctgggctcaagcgatcttcccacttcggcctcccaaagttctgggattacaggcgtgagccaccgcgtccagctatgcccaatttatagctatgtggccaggaggtggtgaagctgaggtccaacccctgttctcctggaccacaaaaaccctgctacactcttctgccccttccactttgcagaccagaaggctcagagaaggtaagtgactctcccaatatcaccatagcaggtcattggcaggggtccagagttgaacccagacctgcccgactcccaagccaaagctaccaggcctcacccccaacccctggaccctggtccagcccccagcctgccctgactcaccagaccccggggggcggcacagggagcacaggtacccccacatgccacttgaacccacccggctgctgcctcggaagctcgtcgctctctgaacccaggccccaggcctgggctgggctgaggctgggggattacccccaaagcgcatgtcagcagcttctgccccattgtccagccaggcacagacaccaagccctggcctctgtcggcaccctcgcccctcacaccagcctgggtggcccctctgcagacctgtcccccatctcacaccagagggttggggcctacttcagagggcgtgggggaccaggccaggatggcaggatcccggaatgctgggggcctccctcccttctctctgaaatgccccctgcccactctcagccaccggggaaggcaggaatgtgctgagctctgggaaatgccttccaggcctggcagcaaccaagcattggggtgtggccagaagccagccagagccctcctcccaggaggggtagaagggatggtatggtcggggctcccgatgggcctgaggagaccctcacttcattgcagtctctctccttcattgattcacgcaaacattcttttgttcctatattcattcaacaaacactcacaagccctgtttagtggtaggtcttttgctgggcacaggggacatcaacagatctaactccaccccagggaggaggcggcaaactcaggaaaggatcctgcaggaggtgatatcggcagtcaaactgaattagccaggcgtggtggcgggcacctgtgatcccagctactcgggaggctgagcaggagaattgcttaaacccaggaggcagaggttacagtgaggcaagattgcgccattgcactccagcctgggtgacagagcgagactctgtctcaaaaagaaaataataataaataataaaaggaagtcaaaatggaagattgaggaggagggagctaaggaaaaaaggagggaagggggttccaggcagagggacaaatgtgggcaaaggaccagaggtgagaaatggagcgggtcttcattcaccatcagcaaacattcagtgagcacctggtcttctgtccagtcccaggctggatggtgctggggacacagtgtgactgggacagctcaggcctgcatccacaccattcacagtccagcagggaacaaacccagaaagaggagggttgtgatggggcaatcataggcagagaggtcaaagccttgatggggaagtccagaaaaggtggctgccccagcctaggaagagaaatcaaggagggcttcctggaggaagtggcatttgagcttgcacctggaggatatatagaagttaacccaaagccatgggtggtgaaggaatgacagtgtgtttcaggtagcgggaacaccctgtgcaaaggccctttgagaaaacggttaaggtgagagtgtgagggaaaggtaagaggaggtccaggggtcagcagggccatgaggagggcctcagactttgtcctgtgggccctgaagagctatcagagggacaaagtatgaatagcactgagcttttaggtacctgaaggcagaaagaggctgagctatcagccaggctagcatagggaagaaaatccccctctctctgctcagggtcaaacagaaaagggaggctggtacacaacatcccctctcttcccttgtcgcagagagcagagatctttgcttgttctcagtcttaggggaaagcatttaaccttttgccataaagtaggaagttagcggtccatgttttgtagatacgctttatcaggttaaggaagcttctttccctagtttgctgtgagttttttgttttcttgtttttgagagatgcgggtctcactatgttgcccaggctggcctcaaactcctggcctcaagcgatcctcctgccttggcctcccaaagtgctgacattacaggcatgagccactgtgcctggcctgctgtgagttattttctttcttttttttaatttttcttttgtttttttttttttaggcagagttttcgctctttcacccaggctggagcaaagtggcacaatctcggctcactgcaaccttcgccccctgggttcaagagattctcctgcctcagcctcccgagtagctgggattacaggcgcctaccaccacacccagctaatttttgtattttacacttgatcttagccaaaaggccaagaagcaataattttgtatttttagcagagatgggggtttcgccatgttggccaggctggtcttgaactcctgacctcaggtaatccacccgccttggcctctcaaactgttgcggttacaggcatgagtcaccacacctggactgttgtgaattcttatcacgaatggtgtgtctctctgtgtgtctctatctttgtgtctctctgttcttctgtttctctctgtccttattctttgtctctctttcctagtttctttctgtctcattctgtctgtgcgtttctctctccctctctctctgtcatgctttccctcacccaagggggtgtggccacgggaagctaagttgggggtggccccagtgtcctggttccggctgtggccaccgcagtaaacacaggacatcctgtgaggctagggaaggaggtggacgcttcttctcagggaccaccctctccagactcagtctgagccaagcaggagccttggcctgccctgcgtggcctagccactccgccccacccagtccagccaagggacactggtgtctccctcgatcccaccgttcacgcccacccccacaccccagtcctctctcctgagctcccggcccagggcccgggcagctccatgccttcccctgggtgtctccccagcctcttgcaccccctgggtccctccttggcctcagccccaaccccagacttgcttctctccccagttgccatctcagggatggccccagtgtctcccagtcccctgattagagccctgagcctggtctgagacccctcctccaggccttgtcagtcccacagcctgtctgctgggcctcctgagtgcctcttccctcccaacagctgctccgtccctccccagattctccacccctgggatcctgggctcctggcctccagtgtcacctccccgacgatgccacccacctagtgaagggatccttttacttcatgactccccagcatcttcagagttaagtcccccatccagggtcctatatgccctggcccctgcggacccttccagtcttgtcatttaccttactgctttcctcctccttccagccaaacccagcagcttagagatccctgaaaatgttgtagggtctctctctcagtgacccttgctgtttccttgcccaccagaacaatagttctttggggcagatactgttactgttccagtttacaggtgaggaccccgaggctcagagaagttaagtaccttgcctagagtcacacagccacagagcggtaactcttttttcttttcttttcttttcttttcttttctttcttcctttcttttctttctttcttcctttctttcttttctttcttcctttctttctttcccttccttccttttttcttctctctctttcctttctttcttccttccttcctctctctcccttccttccctccctccttccttccctcctgccttccttccttccgtccttccttctttctttctgacagggtcttgttctgtcacccaggctggagtgcagtggtgcaatcatggctcattgcagcctcaaactcctggcctcaagtgatcttctcacctcaacctcctgagtagctgggactacaggcgtgagccgtcgcatctggccaaagctggggttcaaacccaggcagtctggctttcaggaacagtctcttctctccagcttactgcttcaataatatctctgttagatttctaaagtgtgccgggactgcataccataggtgctcaataagtgttttttaattttgtttggtttggtttttttgagatggagtctcgctctgtcgccaggctggagtgcagcagcacaatctcggctcactgcaacctccgcctcccgggttcaagtgattctcctgcctcagcctcctgagtagctgggattacaggcccgccaccttgcccagataatttttgtatttttagtagaaatggggtttcaccatgttggccaggatggtctcaatctcttgaccttgtgatccacctgcctcggcctcccaaaatgctgggattacaggcgtgaaccaccatgcccggccactcaataagtgtctaatgaatagggacagaggtagaaggtgagccttggaaagtacagaattcagaccccagagaagtggggtaataagggcccaggggcaggggagagatgtggtcagatttaccctttacatagggataggcacacagtaggtgtgtgctcataaatttttgctgaatgaaggacaggaagaagggagggaggaaaaagagacaagatagctggtcacagctcttccaggtgtgagagagagagagagagtgtgtgtgtgtgtgtgtgtgtgtgtgtgtgttttgggggtggtctgtgaatgccatggaggaaagctggcctagggggcgtcatggcgagcatacacagaggctctgtgaaaggtggcagttgtgccagggctggcggctcagctaggaatggtgtgggccctggagtctgctggccaaggtggtgtggcctcctggggttgagcctgagggtggagcagcacaccagagccagggagcctgcacaacccatctgggggtgacacatggggagagaggggcaggtcctcacacatgagccattcataaacctgagggcaccgggcagacgggaccagggctgatgtagcccatatggtgcttttgtgtaaaagacatgccccttcctggaggtacttgacctccatctgctgggaaacttgtaataaatatgtaaatgcagggtacctggaacaccagtggcagccccttacatacggagcctatatgcagtgcacaacctatgcaactgtacctagaggctctggggagaggggccatcagtggcaaagcaggcacaggggcagacggaaggatcagctcaccccatattgggcctcggagacatcagaaacaggtccttagctgggcacagtggtttgtgcctatagtcccagccactctgagggctgaagccagaggatcctttgagcctaggagttcaaggctgtacagcactatgatcactcctctgtacagacagtgctctccagcctggacaacacagtgagacccaatctctttgaaaaagcggggaaaggaaagaataagaaacaggcccacgggaatcccagcactttgggaggctgaggtggaaggattgcttgagcctgggggttcgagaccagcctggacaacatagggcaacactgtctctacaaaaaatttaaaaaatcggccgggcatggtggctcacgcctgtaatcccagcactttgggaggctgaggcagggcggatcacttgatatcaggagttcaagactagcctggcgaacatggtgaaactctgtctctactaaaaatacaaaaaattagccgggcatggtggcaggcgcctgtaatcccagctactcgggaggctgaggcagaattgcttgaacccaggaggcaggggctgcagtgagccgagattgcaccattgcactccagcctgggcgacagagcgagaatccatctcaaaaaataataaataaataaataaataaaaataagaataaaaataaaatcagttgggcgtggtggcgtgcacctgtaaccccagctaattgggaggctgacgcgggaggattgctgaagcccaggaattcgaggctatagtgagctatgatcgcgccactgcactctccagcctgggcgacaaagcgagaccccgtctctaaaaaaaaaaaaaaaagaaaaagaaaagaaagaaacaggcccgcagagtgttgtaaacagagggcgttcatgatccctcgaccactggacagatgtccggggaacccaagacggcggcaccgcagagcccgactgggcaccagggggcggtgctgagctcagcccaggcgcccaagttttgagtctgcggcaaagcagtccgagtcccatttgcccggggctggagtcactcggggttggagtcaggcgcctggaagaccctcagcctggacgacagctccccgcaggccattttcacccgcttccgcggcccgcctcatccacttccagaaatgggcacaacttcctctgctcctccaggaagcgccactctgcccgccccttcccggcccctggggccgacccaggctccccatctggcccagctccactcctgcctctgcctccccgaggcttctggccagaagcgaggctctgggaccccacgatggcggcgtttccctcactcaaggccccgctggcccctcgggtcaccgtccagccccctgcgcctctctccatgcgcacccgcagttttcacggtgacactccctcccctccgtgcaccccccctcaggctccgccctgtccctgcggccgtcaggaaggacgcagcctgggtcccgtgccaggccgctgagtgtgcggcccctcccagccaggcctggaatgcggctggaccgcgggggcggccgctgacacccggcgctccagccaggcccagcacacgggcaggtggccccagctcgtccgggtctgggtttcttctagaaggaaggcacagctgcctgccctgagctccctctctgcagtccagctaccaagcctagtggctttatttcagacacagctccaagcgtccctatcctttgcccagagatttaagaccaggagtgaattttatttttaaaaatgggctgttgtccccctttcctcccccattttcctggagagccgactctcagggctccttggagaggatctgtccagggtccaggttttgtgtttttatttcgggaccattctgaaagcaatctccccttcgctcctcaataaatacaggtagactccaggcgaggacttgctttcatttttaaaaagttgccttgacttcctgctagcaaagaaaagaaataaaatttaagaaaaaaaaaaaaaggccaggcacagtggctcacgcctgtaatcccagcactttgggaggctgaggcaggcagatcacgaggtcagaagatgaagaccatcctggctaacacggtgaaaccctgtctctacaaaaaatataaaaaattagtcggtcccagctaattgggaggccgaggcaggagaatcgtttgaacctgggaggtggaggttgcagtgagccgaagtcacgccactgcactccagcctgggcgacagagtaagaatctgtcttaaaaaaaaaagaaagaaaaaaaaaaagtggcctggtaggaggatcgcttgagcccaggagtttgaggctgtagtgagccatgatcagaccactgtacttcaacctgggtgacagagcgagaccctatctcaaaaaaaaaaaaaaaaaagttcataatttaaaacccacctcaagtgataatcttggaaccttggttttctcacctgtaaaatagggatgataatactaccgatcttgtagggctgttataggattaaatgagttaacacagtgacgtgcttagaaactgtgcctcgtacacagcctacgcccaataaaatgtttgatgtttttatctcgccttcacatttgcccagagacaaagcagcacacggatttgagatttcccaggactggctttaatttgaaaaatctgattggggtctcttcccgtatcagagaaggaacagcccaagctatgaccccagggccagggaattcagtccccaccagaccctgtcattccatcactagggggtaattccaggctccccctgccagccctgagacaggaggacggatgtgaagttgcccaggactagattctgtctctccaaagtggcccaagccctgttctctgtactagggaagccagctgtgtcttttcgaggacagttggtccagccagcaggctcagttcagataccagacaaccattccagcacgagggctcagcgccctggccccggcggtcgctccagtgcctgtgtgcccaccagcacatccatgaggtagtccaattcggcctcgtccagctccggagcttcctccttgcccggcccatcctcagggcctggtttgaggccctcagaggctggtgcccaaagttcattgtcatacatagaggtgtcaatatcctcaaacaggccctcaagcccatcgtccagtagacagccagtggctgggcccagcaggtccaaggcacccaggctgggcgctgctcccccgatgctacggcctggtggcccctcgtctgccaagggttggggagcctgactcaggccctcaatgtggctgaggtcctccaggaggctggccatggaggctgaaagggcagcgtccgagcttgccagtaagttgtcagccacactgggggctgcaggtgggctaggcacaggtggcagggcagccgcgggtgccatggacgcctggatgcgccgcagagtgttcacgaccagcaccaggtgccgcaggtccggctcactctgctgcaggctgtggtggagcttgagcactgagaggtcaaagagggagctagaggccacggccgggggtgcctgtgccaccgctgtgtggccaggatctagccaccaggagtcgactgccagaggttccttctcctcctcctcctcccgtttccgcttcagacccttgctcagcatctgcagagggcagggagttatggagttatagtcagttatagaaaacaaatgttaagttcaaagcctggatctgacagttgctgcaggtaggatcttggggaagtcacttaacctctctgtgcctagcttttcttagggaactttaaagatatagacaatttttatttaactgtatatgtatatttatagattttttttgagatggagtctcgctctgttgcccaggctggagtgtaatgccgtgatctcagctcattgcaacctctgcctcacaggttcaaatgattctcgtgcctcagcctccccaaaagctaggattacaggcacatgccaccacacccggctaatttttatatttttagaagaagcatggtttcaccatgttggccaggctggtctcgacctcctggacctcaagtgatccgcccacctctgcctcacaaagtgctgggattacatgcgtgagccaccgcgcctggcctatagacttcttaaattttaaattttatatttaagtatatttatagacttttttatctgaaaaaataaagatggggtctcactatattgcccaggctggtctcaaactcctggcctgaagcgatcctcccccctcagtcaataagtacttttttttttcccttttatttttttgtagagacatggtctcactatgttgcccagggtggtctcaaactccttgcctcaagccatcctccttcctcagcctcccaaagtactgagattacaagtgtgagctgcctcaccctgccaataagtacacttaatgataacattattatttcttcagtgaaccatgtggaatggccaatattcaactttttcccctacaaaagcagctgtttcacatattttattataataacataattatatctaaataagttataatattataaatactaaactagtttcacgtagtttaatatttattgtctactatgactatgtttcaaacagtaaataaataaggaaacacaggaaatgtacagagaattacaggaagacactaaaagttcctagagaccttttagatcatcagagaaggctcctgtaaggaggtgacatttgaatggagccctcaggccagagaagtcagccatgggagaccctgggaaaagcattccgggaggagggaacaacaaaaaaaggcagagaaaagcccagaggctggatgggcttgaactggaaagagaccagcatgggtggcacacagagagtgacatggtaggagaccagattggggagcagctaggggaacgggcacaagccaggtcacagaaagccacatatgcagaagtagggagtttggattttatcctgagtgtggtgggcagtcattaaaggaatttgagcagggagggaatggtgctgtgagctgattaggtttccggaagatcccccccatggctgcttcgaggaagactgtggggggcaaaaagaggggggatctgagacccactggtaggctgtactcgtttgggacggacgatggtgatggcctggagtaggagctggtagtggcatggaaggaagtcggtcgagtcaggacttatttgggaggcagaatagacagggcttgtcgggaaatcgtgatcggcaccgggttcagtcactgagataagtttgagggtccactgttcttggagtggcgggggtagggctggagttttggactcctggcgctacctacttttttgggccaggaagactgtagagtccagtttcggaaccctgcctagcaagattttaagaatggcccaccacactactcaaaacagggtcttcgtccccttccccgcagtccggggagtccggaaccgcaggaattccgcccccacccccgactccgcccccgggtcccggcgccccctagcggtgcccaggccggctttcccccggggattctggcccctctgaccccaggaccccttctactgccccgattcccggctgtgattcctgccggcctcccggcgccgtgcgagccgggacccctggcgggctgttctctgcgcccggcctccgctcgcttccggcagtggaggcggctcctcccgaagcggcggcggcgggggcgggtgagtcacgcagccggagccaagaagccggcgcctccgcccccttctcggactgcggcgtgattcacccggcccggccggggcagacagcacgtagaggtccgtgcgtctcgatcccgggcagccccggcgggcacctgtcggacccagggatcgaactctgtgaaggacccggccgctggtagcccttctgttcccaggccccttcatttacataccttgctcactagcggccaatcagaacgaagaggtagccacccacaaccaatcaggaaacggcggcggcagcatcgcttgttggctgtcctccggaaacccgcgcctgggtcgcgagacgcagttctgactccggctcacgactccagactcctaactacccttagcgaccgcccactctcgtggctgccccgccctccgccccagggattggccctgcatggtgatgggcggagcttgtagggggcggattctgaaggaggggcttcagggcgcatgcccgggcagctgcgcgagtgaggggtggaaagaggtggctttttactccggggaacggtggcgagtgggggcttttgcctctcaaaatacgagcccctcacaactacccatgcacctgccaaacccggcaattaagcttcttacacatccagccccgacaggggtctacactacagataatgcccgggttcaaattccgactccggattccccactcactggatgcgtgaccttggaaaaatgatcaacctcttcaagctacacaaagttaaatggggatcgtcttgcctacctcttgacaggatactttaagtaggatcgtatctataagaacacaataccacactcaagcaatgctggacagttggacttaattgtggttaaaggcgggagtgaggtgggagtgcgataccaacggaatcacatcccgggctccattccctaagcagctgtgtgacctgcggcaagtgttttaatcccttctggtctgtttctcctttaaaatgagagaaaatagcgcctagtttacaggattgtttttaaggattaaattaattcatgaaaaatcttcagagtggggtgcaacatgttttgtgttttttttttttttttcattttatttatttatttatttatttatttgagacagattctcactccgtcgcccaggctggagtgcaggggcacgatctcggttcactgtaacctccgcctcccaggttcaagcaattatcctgcctcagcctcccgagtagctgggactacaggcgtgcgccaccacgcccggttaatttttgtatttttagtagagatggggtttcaccatgttagccaggcaggtctcaaactcctcacctcaggtgatccgccctcctcggcccctgagtgttgggattacaggcgtgagctaccgcgcccagctgcttattatttttttctttactttttattttattttattttgcttttgagacagggtctcgctctgtcacccaggctgaagtgcaggggtgccatctcggctcactgcagcctcccaggttcaagccatcctcctgcctcagacccccaagcagctgggactacaggcgcacaccaccatgcctggttagcaacgttgtttctttgttagtagtaatagctgttgtaataagacaagctcttagttcaaggtggatagacatgcaggatggggctagaggtagacagggtataatactcctcccatggccggatgcagtggctcacgcctgaatactctctcacctagatttaattgatagttgttagctaggcaacaactgtaatccagtactttgggaggccaaggcaggagggtcacttgagtccaggagttcacttgagtccagcctgggcaacacagtgagatctcatcactacaaaaaaatttaagaattagccaggcgtgggccgggcgtggtggctcacgcctgtaatctcagcattttgggaggccgaggtgggcagatcacgaggtcaggagttcgagaccagcctggccaacatggtaaaaccctgtctctactaaaaatacaaaaaatcagccaggtgtggtggcaggcgcctgtaatcccagctactcaggaggctgaggcaggagaatagcttgaacccaggaggcagaggttgcagtgatccaagacagcgccactgcactccagactgggcaacagagcaagactctgtctcaaaaaaaaaaaaaaaaaaggattagccaggcgtggtagcatgttcttgtggtcccagctgcttgtggggctaaggtgggaggattccttgagcccaggaggtcaaggctgcagtgagccatgttcatgccgctgcactctagtctgagtaacagaacaagaccctgtatcaaaaaaaaaaaaaaagaaaaaagtagtagttggtaacattgtgctaagttccctttatctacatatgtgtatatattgtttcttttgctaaacctttggagagtaattgcaagcatcttgatattctacccttaacagctcaggaggcatctcttaagaataaggacattaggccctgtgcgttggctcacacctgtaatcccagcactttgggaggctaaggcgagtggatcaccggaggtcaggagttcgagaccaggctaaccaatatgatgaaaccccgtctctactaataatacaaaaattagccgggcatggtggcatgtgcctgtaatcccagctactcaggaggctgagacaggagaattgcttgaacccaggaggtggaggttgcagtgagctgagattgcgtcattgcactccagcctgggcaacaagagcaaactccacctaaaaaaaaaaaagaataaggacattcatgtacaagccacaaaaatactatttcacatctaatagaatcaagaattccacaatatcacctaatcaaatctctccaactgacccaagaatatcctttatagttgctttcttttctccaaaatcaggatccaatgaaggttcacatgctaatttggttgtaatgaagaaattacatactatattttattctcgaatattcccccacccaaatcccttttttttttttttttttttttgagacagagtcttgctctgtcgcccaggctggagtgcagtggcatgatcttggctcactgcaacctccatttccgggttaaagtgattctcctgcctcagcctcccgagtagctgggattattggcgtgcgccaccacgcctggctaattttcttgtgtttttagtagagacagggtttcgccatgttggccaggctggtctcaaactcctgacctcaggtgatccacccgctttggcctcccaaagtgctgggattacaggcatgagccaccacactcagcctcaaatcctttttgatgttttgttgacattgaatttctggcaaaacagactagtcatgctgcatagtgtcccacattctggatttgtctgactgtgtttaatttgttcctctctttttccaataagctggaggttgggtctaggggcctggtgagattctgcttatgcagtgaacagggagactccacagggtgtgtcctaatccttattaatgtacttcctaatcctaacgcattatagtagttggcaccagtgtcaggatgtcccaccattggtaatgcagagtttcatcacgtgattaagattgtgagggttacatcgtaaaataaatttatcctttctagttagcaaataacctttgggatgatgctttagagcctgtgaagatcctatctccaagatgtatgtggtggctcatgcctgtaatgctggcactttgggaggccaaggcgggaacttaagcccaggaggttttgtgatttttttttttttttttttgagacggagtctcactttgtcgcccaggctggagtgcagtggcacgatctcggctcactgcaagctccgcctcctgggttcatgccattctcctgcctcagcctcctgaatagctgggactacaggtgcccgccacctcgcccggctaattttttttccttttttttttttttgtatttttagtagagacggggtttcaccatgttagccaggatggtctcaatctcctgacctcgtgatccgcccgcctttgcctcccaaagtgctgggattacaggcgtgagccaccgcacttggccagttttttttttttttttttttttttttgagatggagtcttgctctgtcgcccaggctggtgtgtaatggcgtggtcttggctcacttcaacttccgcctcccgggttcaaggattctcctgcctcagcctcctgagtagctaggatacaggtgcatgccactatgcctggctaatttttgtatgtttagtagagacagggtttcaccatgttagccaggctggcctcaaactcctgacctcaggtgatctgcccactttggcctcccaaagtgctgggattacaggcatgagccaccttggcctcccaaagtgctgggattacaggcgtgagccaccacatctggctttttttttttggggggggggatggagtctctgtcacccaggctggagtgcagtagcacaatctcagctcactgcaacctccgcctcccgcgttgaactattctcctgcctcagcctcctgggtagctgggattataggcgtgcaccaccatgcctggctaatttttgtattttcagtagagacggggtttcaacatgttggtcaggctggtatcgaactccacccacctcgccctcccaaagtgctgggattacaggcatgagccactgtgcctggccagagcccaggagtttgagactagcctgggcaacacagcaagacccaatctccacaaaatactggtttttgtttatgttttgtttgtttttgagacggagtctcgctctgtcgccaggctagagtgcagtggcactatctacagaatactgtttttaaaaacttatcctagcatggtggcatgcacctgcagtcccagcttcttgggaggttgaggtggatcacttgagcccaggagtttgaggctgcagtgagccatgattgcactagtgcacgccagcctgggtgaaagagtgagaccccaaaagatcctgttttccactaacttttcacccaactgtttgagcattcattgacaattgctgcctgaattaactaccatagttagcatttttgagaacttactttggccaggagctttattcaaaactaaaagctcttcccacagctcaggaattaacaaatgagctacttgaagaaggttaagtctcattgccagtttatgggacgagtatttttttttttttttttgagacggagtttcgctcttgttgcccaggctggagtgcaatggcacagttttggctcaccacagcctctgtctcctgggttcaagaaattgtcctgcctcagcctcccgagtagctgcgattacaggcatgcaccaccacgcctgaccaattttgtatttttagtagagacggggtttctccctgttggtcaggctggtcttgaacttctgacctcaggtgatccgcctgcctcggcctcccaaagtgctgggattacaggcataagccaccatgcccggtccacgcctggctcttaaatttttttgtagtgatgagatcttaccatgttgcccaggctgatcttgaactcctggactcaagtgaccctcttgccttggcctcacaaagtactgggattatagttgttccctgtccaacaactatcaaataaatctaggtgagatagtattcagatgctcagaatactttttttccccatcttttctatgtgcttgaatttttaataataaaattaaggtaagatgctaattagaaccaggcccccactaggcaaattcacattttctgccctccagaatccatttttatggctggcaaaagggacgcctggacctggagtctcccagtggcttactccaggtcatacactgaaggaaaaggaaattttccttcatgcttgtagtttcagctgcttcagaggctgaggtgggaggatcgcttgaacctgggagacagaggttgcagtgagccaggatcaggctgctgctgcgctgtactccatcctgggcgacagagcaagactctgtaaaaaaaaaaaaaacaaaaaacaaaaaacaaaaaacaagaacaagagctcagaggaatcatctgattaatatatatttattaagcacctactatgtggtggccactgttgtagatggtgaggatacagcactgggtaaatttcacagagtctcccctctcatggaacagggtaggaggtgaagagagaaaatatatatgaaaacgaatgcattcattgatttgcaaacatttatgtcttgagccccttttgtgtgccagacactgttataggcactgaagaaagggcagtgaaattatagatgaaaatctcttatgggagcagatgaacaataaacaaattaccttggccgggcgccgtggctcacgcctgtaatcccagcactttgggaggtcgaggcaggccgatcacttgaggtcagaagttcgagaccagcctgaccaacatggtgaaaccccatctctactaaagatacaaaagttagccgggtgtggtggcaagtacctgtactcccagctacttgggaggttgaggcaagagaattgtttgaacccgggaggcagagattgcagtgagccgagatcgtgccactgcgctccagcctgggtgacagagcaagactctgtccgaaaaaagaaaagaaaacaatctaaacaacaacaacaacaaaaattgaaaaaaagacagcaaattaaatcaatttaatttgcatttttagtagagatggggtttcgccatgttgatcaggctggtctcgaactcctgacctcaggtgatccgcccgcctcggcctcccaaagtgctgggattacaggcatgagccaccacgtctggccagtttttttttaattttttatttgtagaagcagagtatccccatgttgcccaagctggtcttgaactcctgggctcgagtgatcctcatgcctccgattcccaaagtgctgggattacaggagtgagccacctggccgccgggtctacttcttttgtttcatcaggtctctgctgaattgtcacctcttcagacataacacatcctcctccccaaagctgcacatctctcagctcactgcaacctccaatctcctgaattcaagcaattctcctacctcagcctcccgagtagctgggattacaggcgcctgccaccatgcccggctaattttttttttttttaatagagacgagggtttcatcatgttggccagactagtctcgaactcctgacctcaagtgatccacccgcctgggcctctcaaagtgttgggatcacaggcatgagccactgcacccggtctgcttttttcttttcctttgcaattacctgctcctaaggtactagataatttgtgtggtttttttgttttgttttgttttgaaagtagcccggcgtgatggcaggcgcctgtagtcccagctactcgggaggctgagacaggagaattgcttgaacccgggagacggaggttgcggtgagccgagacggtgccactgccatctcaaaaaacaaaaacaaaaacaaacaaaaaaattagccgggcgtgcctgtagttccaggtacttggaaggctgaggtaggagaatcacttgaacctggagtttgaagctgcagtgagctatgatcgccccactgtactccagcctgggcgacagagaacgactctgtctcaaaaaacaaacaaaccaaaacaaatgagagaggtaggaaaactagaggaagagcattccaggcagaggcgagagccagtgcaaaggctctgaagtgctgcctgtcaggagacaaggccagggcagctggactgggagctgccgggaaggaggtccgagaagtgaggccttttagcctactctgtggacctttgttttttactccgagcgggatgagaagaccctggaagatgaatcgatgagaaaaataatttccgtttccgttcagtgacttgaagaaaacaaaataagacgggataatcgcctgtaaccagggtggtcctagagagagattcttcgaggcgttgacattggagctggggccagaaaatggagacggagccaggaattcaaaggctgggggaagggagaagaggagaggccgggcctggggaaatgaaaccatcggcgaagccaccgggcccggcaggcctggagagaagcctccgcctgctggggagggaggcagggaggggggtcgggaggcgcggcccgccccgtccggcctctggggagggaggaggcgccaggccggctcccggccgcggccgcctcccgggtaccccggccggcccagggcggagggtgggcagcggggagggactgggccttcccgccacgcccagggcgggccgcgggcccatcccccgccgcggaggagggcaggttggggaacgtggacactgccctcggggactcggttccttctgcagggccagcctttccacttctgtggccagttctttttaacaagtgcggtgttaaggaaggcgctgggcctctcggagcctcagttttttcatctggaaagagggtgctcctcttactggcctcatcgcggtgctaaggaactgtgcgattccccttcccagggttatcttcagggcaggcagagagctgcagggaaagggggagggcggggcacggtggctcactttttaaacaaaaagtttgtttgtttgtttccagacgaagtcttgctctgtcgcccaggctggagtgcagtggcgccatctcggctcactgcaaccttcgcctcccgggttcaagcaattctcctgcctcagcctcccgagtagctgggattacaggcgcccgccaccacacccggctaattttcagtagagacggggtttcaccatgttggccaggctggtctcgaactcctaacctcgtgatccgcctgcctcggcctcccaaagtgctgggattacaggcatgatccaccgcgcctggcctgtttgtttttgagacggagtttcgctcttgtcgcccaggctggagtgcagtggccccatctcagctcactgcaatctccacctctccggttcaagcaattatcctgcctcagcctccggagtagctgggattacaggcagctgccaccttgcccagataatttttgtatttttagtagaaatggggtttcactatgttggcgaggctggtattgaattcctgacctcaagtaatccgcctgcctcagcctcccaaagtgctgggattgtaggagtgagccagggcgccctacctgtttttgtttttgaaacagggtcttgctctgtagcccaggctggagtgcagcagtgggatttcctctcactgcaacctctgcccattatgggctcaagcgatccttctacctcagcctcactagtagctgggactacaggtgagcaccaccacacccagtttttttgttttttttgtttttttggttttttttttgagtagagacaggacctcagggccttgccatgttaccccaggctggtctcaagctcctgggctcaagcaatctgactgccttggcctcccaaagtgctgggattacaggggtgagccaacgtgcctggcccttcttcaggtttttacccaaatgtcaccttgtctcagacgccctatctggccatcctatgtaaattgcaacaccctcctcactcctctgctcccccctgcccccacagcatttatcaccacctggctgacttacacattttcacttctttttttttttttttttttgagacagagtcttgctctgtcacccaggctggagtgcagtggtgtgatctcggctcactgcaacctccgcctcccgggttcaagtgattctcctgcctcagcctcctgagtagctgggactacaagtgtgcatcacaatacccagctaatttttgtatttttagtagagatggggttttaccatgttggccaggctggtctcgaactcctgacctcaaattatccacccaccttggcctcccaaagtgttgggattacaggcgtgagcccccacacccggccttatttttctttttatttacttaattatttttgagacataattttactctggttgcccaggctggagtgcagtggcctgatctcagttcactgcaaccttcacctctcaggttcaagcgattctcctgcctcagcctctggagtagctgggattacaggcgccggccaccatgcccagctaatttttttgtatttttggtagagagggggtttcactgtgttggccagtctgctcttgaactcctgacctcaggtggtccactcgccttggcctcccaaagtgctgggattgcaggtgtgagccacagcgcccggccctatctaactaactatctatctatctatctatctatctatctatctatctatctatttggagtgggagtctcactctgtcgcttaggctggagtgcagtgctgtgatcacagctcactgtaacctccaactcctgggctgaagaagggatcctcccacccgagtcttctgaatagctgggactagcgtgcccagctaatttttttttaaaattgttttagagatgtggtcttgctatgttgcccaaagtggtcttgaattcttggcctccaataatcctcctgcctcagcctcctgagttactgggctcatagtcacgtgctgccatgcctggcattatttttcatgtgtatttcactcttcccccactgttaaatttcatgagagcaggaattgtctattttatttattttcctgctgaagagtgccaggtccacagcaggcactcaataaatctgagccattattggaatccttggcctgcctcaggctccctgacactttgcagtgtgaggcaggtattactccagatccttcagtttggaatatggtgtatatgaggaacagcagggaatggtgtggtgggagtataagagtgagggtgtgtaggggagatgagttcagaaaggtgggagggaaagttagtcattgctaggtctggagttcatttttttttttttttttttgagacggagtcttgctctgtcacccaggctggagtgcagtggtgcaatctcggctcactgcaagctccgcctcccaggttcacgccattctcctgcctcagcctcccgagtagctgggactacaggtgcccgccacctcgcccggctaatttttttgtatttttagtagagacggggtttcaccgtgttagccaggatggtctcaatctcctgacctcgtgatctgcccgcctcggcctcccaaagtgctggaattacaggtgtgagccaccgcacccggcctttttttttttttttttttttttttgagacaggacctccctctgttgctctgttccagatggagtgctggagtgcagtggtgttatctctgctcacagcctccatttcctgagctcgagcgatcctcccacctcagcctcctgagtaggtgggactacaagggcatgccatcagcccagctaattttattttagttttttgtagagatggggtctccctgtgttgcccaggctggtcttgaactggacacaagcgatcttcctgcctcagcctcccaaaatgctgggattacaggcgtgaaccactgcacctggccaagtttttcaacaacaaataattttttttttttttgagatggagtttcgctcttgttgcccaggctggagtgcaatggcacgatctcagctcaccacaacctccgcctcctgggttcaagtgattctcctgcctcagcctcctgagtagctgggattatagccatgtgccactacgcctggctaattttgtatttttagtagagacagggtttttccatggtggtcaggctggtttcgaactcctagcctcaggtgatccgaccgccttggcctcccaaagtgctgggattataggcgtgagctaccgtgcctgacccttcaacaacaaataattttggagagtgcagttgtgccaagcatagttctaggcacagaccaacacaaccctcagagttcccaggagagtaggaggctacctatagatgggaaataagtaactcgagattgggtagatgctactaaaacaaaatcagtccaggtgcagtggctcatgcctgtaatcccagcactttgggaggccgaggcgggcggatcacctgaggtcaggagttcaagaccagcctgaccaatatggagaaacgttgtctctactgaaaatacaaaatcagctgggtgtggtggcgcatgcctgtaatcccagctgttcgagaggctgaggcaggagaatcacttgaacccaggaggcggaggttgtggtgagccaagatcgcgtcattgcactccagcctgggcaacaagagtaaaactccgtgtcaaaaaaaaaaaaaaaaaattagccaggtgtggtggcatgtgcctgtaatcccagctactcggaaggctaaggtagaagaattgctggaactgggaggtagaggctgcagtgagccaagatcatgccactacactccattctaggagacagagcaagactccatctcaaaaaaaaagaaagaaagaaaatcaaacaagttgtggtggggtggtgacccacctggatgtgttgagctaggaagggcaaggaagacctccctgagaaggggatattgggattggtgaagctattggggaaaatgtccactgggaaaatttaacagttagggcaaaggccctggggtgagaaggagctggggtcaagggagcccagttgagtgatggagagagtgggagatggaactgagaaagttgtccgaagtgagaataagtcagtccttgcaggtcttggtggagctggcgctttattgagtgtgtcaagaagtcactggaggctgggcgtggtggctcatgcctgtaatcccagcactttgggaggctgagatgtgaggatcgcttgattccaggagttcaagaccagcctgggctacatggcacaaccccatctctacaaaaaatacaaaaattagtcaggtgtggtccacgtgcctgtagtcccagctacttgggaggctgaggctgaggtgggagaattgcttgagtccatgaggtggaggttgcagtaagctgtgattgtaccactgcactccagcctgggcgacagagccagagaccctgtctcaaaagaaaaaaaaaaaaaaaaaggcactgaaggtttcaaggaggaagacatgattcaattgccatcatattgggatgcagacctggttgcttaccttttatttttattttttacaattccacagcaagtatcacacctggttgcttttttttttttttttttgagatggaatctcgctctgtcactcaggctggagtgcagtggtatgatctcagctcactgcaacctgtgcctcctggattcaagtgattctcctgcctcagcctcctgagtagctgggaccacaggtgtttgccaccatgcccagctaattttttgtatttttagtagagacagggcttcgccatgttggccaggctggtctcaaactcctcacttcaggcaatcctcccgccttggcctccctaagtactggaattacaggcctgagccaccgcgcctggcctgtacctggttgctttctttagatcctctgggccacctcattcctctctctggattggcacccacctcttcaggttatccctccactttctgacaatgaccccttcaggttgagaaatctggctttgacccagaaaccacaagcaaaatccccatcctttctccacccatggactatactcaggtgttgttcctcctcgcagcccttccagaaaagtccctaatgctgtgtagctcacttgcttcatctcttcaaagaccattgtaaaggcatagcctgtacaggtatcacattacctcttccttcacttccttcacctccttctcctctcctgtatctcagcagcctgggctcgtacctccgaaataaagcatcagcacaggtcaggcacagtggctcatgcctgtaatcccagcactttgggaggctgaggcaggcgggtcacttgaggttaggagttggagacaagcctggccaacatggtgaaactgtctctattttaaaaaaaatacaaaaattagctgggcgtggtggcaagcacctgtagtcactgctattcgggaggctgaggcaggagaattgcctgaacccgggagtggaggttgcagtgagccaaaatcctgtcattgcactccagcctgggtgacagagtgagactccgtctcaaaaaaaaaaaaaaaaaaaaagcattagcactataaatctaatctgggctctgcttcctagccaactctcctaaagaggtcttttagtactgggggtctttgggcattttcttgcccctctgggctcagcagcacattcagtgacacatactccgtgtgactcagtttctccctcctgtgcccacccacgtggctggttagtctaagaagcaacatttataatagtgaaggacaaggctctggaggccatttcagcctagctccctggtccttgttcttcctagctgtgtggctctgaattaagtgacttgtcctctctaaacttctggttcctcctgtataaaaagtggtaacagtacttacttctatatgaggattaacagacttaattcaaataaagtggctagaacagtgctcttaacaagcactaatttttttctgaggctggagtgcagtggtgtgaccatggcttactgcagcctcaacctcccaggctcaggtgatcctcccaactcagcctccccagtaactgggactacaggccgccatgcctagctcctttttgtattttttgtagaggcagtgtttcgccacatttcccaggctggcctcaagcagatcctcccaaagtgctaggattccaagtgggagctagagcactcagccaacaagcactcaataaatgtcatgtacaatgatacacctaccccagctatggcacggaagtggtgctgatgtttaggaacttaccaggtccctcccactgacccagtgaagtttagaaacattagacaacatccctccttccaaaatacttttatttaaaaaaattacaaacaatccaaaaaaaaaaaaaaaagccaccacaaactctgcctttcttttaaataacccggcatggagcagtttggtttccaccctattgcacgtggtccggcctggttatgaaatcaggaggctgctgagactggggtcctgccgaggaagtggggttcagcctggagggaggacaccagcccctcccaccccctcaaggtgcaagaggcagagcctgggtttctatagcaacctggcagcacatccctgtcatccttcgacaggcccagctttctttatcttccctgaggccccagtggtcacaggggagtgggaactagcaggaaaggtggaagaaatgtgtaagtggaaaatcagactcccagaaacagagtctcgttaaggcatttggaatagataaattaattcaggaagacccaccttcacagaaggtcggggtaaccagacacacacacacatgcaagacagtttgtggaaccctgaaatgggaacaaaggaggccatagtcactgcttcgagcccccacaaaaacacacacccagagttgcattcagggatccaggccaccgaagatgacatgaggaaggatcgatcccctctatcacagttttaggaccccagaatgatttccatgatgtgatccagttcattccactcccaagaacctggggcacagaagaggttgtgaggaggctctggtggggcccgtgcaggctccttttctaccgcagatgtgtcaatgtccagaaagaagtcatccaggccagagtcccccaagtaccgggagctcagagcttctaagaagactggatcaggctggggtggcacttcattctggaggccaaggggagtcactggattctgagggggctcagtcccatccatggaggtgtccagctccctgaggatagagccaatggtggctgacagggagaaatcctcctcgcccaggaagaggggctcggggggcagggcaggggcgggagccaggcgaagtgcagcctgcagctgttggagggtgttatggatgaggacatgcctgcggaggctgggtgctcgggggcccaggctgcgctggactttgtctagggagatgcggagcagggcttgctggtagctctgaaggcctgctggactccactcccacctctcctcctcctcttccaaatcagagtgtttcctcttcaagcctcccaccatgatgccctgtagagagaagaggcgcataggggaaggtcagacaccagacaccgtagtgctggctcatatcccactttctcaggcctattgagttgttagtgatttttaatcatcggaatctcagtttactgatgtataaaatgaaggctgtctgaatcctacaagtttaagaaggtgagtacatatacgattaagaaaataagatctggcgttacgtacagctagatttaaatctcacttacttgcctgttgtggcctcaaacagtgaatttacatccatgagaatcaatttcctcatctgccaagtacggatcctaactcaagttcctctaagccttaaaactgttcttccacaatattaatttcttcaaacatggagcacgaaagacaagtgtggagcacagagacctggattggaagtagggaaccccaaatctgaattctgtattggaaactgctcagctgcgtgatcatgggaagtgatctgaatgagtcaattctcagggcctcagtttcctcatctgtaaaatagggactgtaaaaaaatacttctcaccacctctgtcaaggagatgccacgtatctatagggcccaccacaccggaagtgcttaatgaacaagagttgtgtttgttttttgttagagacagggtctcgctctgtcgcccagggctgagtgcagcagcgctatcacagctcactgcagtctcgaagtcctgggctcaagcgatcctcccgcctcagcttcctgagtagctgggattaccaccacacccggcctcgatcaagagttaattgccagttattcgctcaacagatttactgagtgcctactatattcgaaatctcctggagccctgttggggaacctatgttgagattcttcttcaacagtcgggatatttctatgtcctcttccttaaccgactgggagcgctcccaagagtaggaaaggggcctgtctcattccctctgcccacgctttcagattcccccaaagcgcgccccataggaaaacttgctagaactcagctcagaccaagccccgccccctcggaggtcccactcaatcagaccgcgacactgtaaggccccgcccccccatgggtccttacagagcatccaggaacgccccaatttggcccaggggcttctgggaaacgggggccaacagccgccaggtacacgaattgacgtcgagcacgcactacaatccccagagggctccgcccgtccaggggacgagccacccccctcaccccgctctccctcagggcatgcgcacaggggcacaggcgggtgggggaagggaacctggacgtccagctgccggcgcctgccgagccccgccctccattgcctccggggccgcgagtctgagctccaggcccggaacacccctcccccaccccagactccggctctaaatttgctttctcccggtccctctgttccttgaaagtccgcgattctccttccaaactgcccttggatccagagacccagatccgaacacatcgctcaaagacgacaatgctccgatctagttcgggagactacgtatcctaattctgatacttcctcccacttctcctagtctcctgactttcaaacgcccctggacttcacctccaaactcgctgtccggctccaagacccgaacattgaactcttcccggcaacctccttcccccgccagtgcgtcttggagtcccaagaatccttgaccctagttctctcgcttctccaaatactcagaatctcagctccgtacctctcacaccttttccagaacacgataaagccccgaattcaacccgtccggaagacccaagtggaatcgaatctccaggttccctgtctcaaaagttcctcccctctgttctctcgcttctccaaaagcccaacgtcccagcttcaaactccctccacttgaaaatactgccccaacaacctcgcctcccctcctgggtcttgaactcagtctcaggtccccagaccctccctatcatcaccctgaatctgaggccccctcccccggtcccacccagaccccgcctccgcaagtccccggggcgcgcttctctctcccccagcctaaggtaaattcccaagccaggcgaccactcctcaccgcagctgccaggttcgccacgaccacctcctggaacgcccacagcgttgcgacccgccagtgccaggacccaccagtgaccggttggagcctcgctcacctcggcggggcctctccgtctggcctctggcccaccagccccgccccggagccgagccgcgagccgcgattggctggagtcccgcccgccgcggggcgtcgattggctgggcggagccatccgcccgtgccccgagacgccggatccgcccacccctccctagcgccccgggccatttaaagaagtgcaactggcagggggcggggcagcgactccggggtggagggcggccggtccaacagaaccgcttccttccactcagctacagtcctcgctccaagatcgtcaccattgctccctgcggttcctttatggtaggcctggactccaccgtggagccagaggggctggcatgcccctccccaagtcgctgtgcaggcgggcggggccgagcaaccggaggaggccgcgcccccggggttccgagggaggacgctggggcgcgggggatgacgtagcggaagaccagccaatagagtggcgcggcccgcgttgcctaggcgatcgtagcctcgcccccttgctgcccctcccgccccctatacgttaccgcgcggccccttcttaatcctcaggttttctcagcacgtcctctggtggtcccacctgggtcttctgacaccctctttccttccccgctccatcaagatgactcctctgctactgttcatggcttcctacccaccccgaatacaaacttcaaactccttccttttgccacaaagcccctcacgaccttgcttgatgcgttctcctggttctctccgatcctgccccattgagtcacttccagtttttctaaaatggcttcaagctcccattcaccccatcaggaaaacgaaaggattttctctgtttgttttcttccctgctttaccccagtgtctacaacaatgccaggtacataataagttcgcaaacatgacaataaaaggcctctggatctttattattaatattattttttgccgggcgcagtggcgcacgcctgtaatcccagcactttgggaggcggaggcgggcagatcacttgaggtcaggagtttgagaccagcctggccaacaatggtgaaaccccgtctctactaaaaatacaaaaattagctgggcgtggtggcgcacgcttgtaatctcagccacttgggaggctgaggcaggagaatcgcttgaacctgggaggttgaggttgcagtgaaggcgagatcgtgccactgcactccagcctgggtgacagagagatgggggaggggggaggggggttttcttgtgttgcccaggttggttttgaactcctggcctcaagcaatcttctcgcctctggatatttaaacttgtttcctcatcctcaaaatataccctcaattcccaggctgcttctcagaacacatttcaaaggtttcctcctctccgaagccctccctggcagtccaggttgggttaggatccattctaggattccatggcctcctgtgccgccatcccagtcctggactgtcagttactatatggactgaggaacgccccgccgagggcaggtaccaaggatatctctgtcaaccacctcttggtctgcaggatcacctagcacagggctggacacgtagcaggtcccagtgaaagtttgctaaatgctcaggaatgtgacagaaaaataaggcagaaagaagacactgctagtgtcctgaaagcccacacccgtaatgctccgcccctacaacgagtttccctaaggggaggaggcagttttctccaggccacctctgggaagggaggtttaagcctcctcagaccagttcttgccggttggagtttgtcaaccaagtcatcctgatgtttgcaggataaatgggaggggaataggtaggtgggtggtgtgggttggaggtagggagagagaagtgtcttagctcacccaggcctagggaaggtgtccctgggaaaaaaagaaagggacagtaggttccaaaaaaggacataattaggaaggagcaattcttccccttcctcctccaaaacctgcgcctcctatagggtccacaactcaggaaagccctactgcatttgggtttttgtttttgagacggggtcccactccgtcgtggatgctggagtgcagtggcgcaccttggctcactgcagcctcagcctccctcctgaagcactagtgtaactctgtccccgggttacagccgtatgcttctttctgatgcctcccctccacccctcaccaactgtccacgcaggctcccaggcattcctcacacccactctctcctcccctccttacagttcctcctccaactccctctgggctatcagcctccattcctggacccttcctttccaccttcacagagtagccaaaggaagcttcataaaacacccaactgtcccccctgccttacttctctggtgctccactccttgcataaatcctcaaaataaagcacaaacttttttttattttcagagacagggtctggatctgtcctacaggctggagtgcagtggccaggccttgacctcctggcctcaagccattctcccgcctcagcctcctgagtatctgggactacaggtacacaccaccatgcccagctaagtttttaaaaattattttgtagagatggggtctcactatgttgcccaacctggactcctggcttcaagccatcctcccacctcagcttcctgagtatctgggactataggtgcacaccaccatgcccagctaagttattattattattattattgagatggagtctcgctctgtcacccaggctggagtgcagtggcacaatctcggatcactgcaacctccacctcccaggttcaagcgattctcctgcctcagcctcctaagtagctgggattacaagtgtgcatcaccacgcctgggtaatttttgtatttttagtagagacagggtttcaccatgttcgccaggctggtcttgaactcctgacctcaagtgatctacccgcctcggcctcccaatgtgctgggattccaagcatgagccaccatgcctggccagactcaataaactgttactgggcggggcgcagtggctcacgcctgtaatcccagcactttgggaggcgaggcaggcggatcatgaggtcaggagatcaagaccatcctggctaacacggtgaaaccctgtctctactaaaaatacaaaaaaattagctgggtgtggtagtgggcgcctgtagtcccagctactggggaggctgaggcaggagaatggtgtgaacctgggaggtggagcttgcagtgagccagattgcgccactgcactccagcctgggcgacagagcaagactcggtctcaaaaaaataaaaaaataaaaataaactgttactgaacaaatgaatgaatgcataacaagcaaatcttacacagaggcaggcagacacaccaaaatactcagacagaggcagagagaggaagagtcacacagtcggtttctctagagtaatttgaagctcttggctcaacatttattgcccccttcctttgctcctcatgtcccagaatgccaccctcccagatggggacagagtgctactggtactggtgggaggggtaggtgctgtgtccgtcgtactcatcggtggtgaggcagcgcagcatgaaatggcccaggtcatgtttggagatgacccttgagggccctcgtccatccagggtcactgtgtacgccccagttagtggctggtctcctatgaagtaaagacaagaggggctggataaagcagacacctttcccttcccccaaaattcgacccccagaaagaccttcccagggtgcctactgtgtgtccagcctgggtggtgtcacagccaagaatggactttccatatgcaggtgctcatctatatcctttgcttcattcattcgataaatccttattgattacctattgtgtggccaggtgctgggcacccaagcaagggacaaagcagacaggaatcccctgccctggccagtggcggtggctcatgcctgtaatcctggcactttgggaggctgagacaggagtatcactcaagcccaggagtttgaaactatcctgggcaacacagggagaccctgagtccactaaaaatacaaaaatcagccgggtgcagtggcatgcccctgtagtcccaactactcaggaggctgaggctggagaattgcttgagccagggaagttgaagctacagtgagccatgatcgtgacactgcactccagccgggacgacagagcaagaccttgtctctaacaacaacaacaacaaatatatatatatatatatatatatatatatatatatttgtcagatagatatatatctgtctatctgacagtaaccaactaaacttagggatacaatgtaccatcacccaaacagagacaggctggaattatgcacagtatggaacacacacccttggctgtgtgtttgcttgggacaaagcagacaggaagctcctgccctggctgggcacagtggctcacgcctgtaatctcagcacttcgggaggccaaggtgggaggatcacttgagctcaggagtttgagaccagccaacatggcaaaaccacatctctacaaaaaatgcaaaaattcgctgagtgtggtggcttatgcctgtagtcccagctacttgggcaggagaatcacttgagcccagaaggcggaggttgcagtgagccaagattgtgccattgcgctccagcctgggctacagagggagaccctgtctcaaaaaaaaaaaaggaacacacaccttcacccatgtggcattcctgcccaacatgtttaatctgaatctgtgacaaaacagctagaaaaatccagaatgtgggcctttaaagtcacctggcctggttaatgttatgagaaacttaaagaaaaagggcagagtgggttgaatttttttttttcttttttggatagagtcttgctctgtcacccaggctggagtacagtggtgcaatcttggctcactgcaacctccacctcccaggttcaagcaattcttgtgcctcagcctcccgagtatctgggattacaggtgtccgccaccacacctggctaatttttgtatttttagtagagacggggtctcaccacgttggccaggctggttttgaactcctgacctcaagagatccacccgcctcagcctcccaaagtgctgggattacagatgtgagccaccacgctggcctgacagttggggaaattttactacggagtggatactaaatgatatgacagagtaaatgtcactttccttaggtgtgagcatgttttgtgtgcaaatatctttcttttaggagatggctgtctaggtatttaggagttaagtgcgacaatgttgcaattcctctcaaatgattaagccaaatatacatatgcatatatgttttcacaatatattcagcaaaatctaactatatattcatggagagagagagaggaggagagagggagagacaacaggataaaatgctaagcattgaacctaaacaaagggcttatgtgtattcataaacctttaatgctttcaaatcgggaggtgtggaagttttcacacacttggctgggcgtggtggctcacgcctgtaatcccagcactttgggaggccaaggtgggcagatcacgaggtcaagagatcgagaccatcttggccaatatggtgaaaccccgtctctactaaaaatacaaaaattagctgggcgtggtggcacgcgcctgtagtcccagctattcggggggctgaggcaggagaatcacttgaacccaggaggcaaaaggttgcagtgagccaagatcgcaccactgtactccagcctggcggcagagcaagactctgtctcaaaaaaaaaaaaaaaaaaaaaaaaaaagccaggcgcagtggctcacgcctgtaatcccagcactttgggaggccgaggcgggcggatcacaaggtcaggagattgagaccatcctggctaacactgtgaaaccccgtctgtattaaaaaatacaaaaaattagccaggtgtggtggcgggcgcctgtagtcccagctactcgggaggctgggcaggagaatggggtttcaccatgttagccaggatggtctcgatctcctgaccttgtgatctgcccgcctcggcctctcaaagtgctgggattacaggcgtgagccaccgcacccggccattaatatctatcttttcttgtctttttctttttttttttagacagggtctcactctattacccaggctggagtacagcagcctgggcaacagtttattgcagccttgatctcctgggctcaagccatcctcccgcctcccagtagctgggaccacaggtgtgtgccacgacgcccagctaatttttttttttttttgtagagataagtctatgttgcccaggctggtctcaaactcctgggctgaagaaatcctcccgtcttggcttcccaaagtgatgagattacaggtgtgaaccaccatgcctggcctatgtatctatctatctatctatctatctatctatctatctatctatctatctaatctctatctcccatactagaaatgtaagccatggcggggcatggtgatgcaggcctgtaatcccagctactcaggaggctgaagccccagaatccatagacataatggattaaaccattagccagtggtaatcccctcaaccttcaatccctcaccactccccagaggtgaaagtcccaaccctgtaatccagccttagtctttctggtgaccagacctgaagctgcctaggggctgccagctctcagtgaactcattagcatagaaaaagacatttaccattttggagattccaaggattttaggagttgtatgccaggaaacagggacaaaggccaaatatatatgtcacaatatcataggaaggtttgcaattttagggtggtcagggaaggccttgcagatctccccagagggcaggagggaacaggcagatggcattggtgccaccaggtccctgccctgcttacctatgtgtggcggcatcacagccacgtacttcaggcctgattcccgcagcaccttgtgcatccggatgtggtcatcagtcacagcctgcagtcgtgggggcaccttggtagggtcccagagcaggaaagctggagggaacacagggcaggatcagcctgggctctcttgtctttttttttttttttttgagacagagtgtcgctttgtcacccaggctgagtgcagtggcgcaatctcggctcactgcaacctctgcctcccgggttcaagcaattctcctgcctcagcctccccagtagctgggattacaggtgcacaccaccaggcctgactaatttttgtatttttagtacagacagggttttgccatgttggccaggctggtctcaaactcctgacctcaggtgatccaccctcctccacctcccaaagtgctggaattacaggcatgagccattgtgcccagccaagggctcgcttgtcttgatgccaggacaaaaccctgccatggctgaccattgctttccagttgcaaaaacaggggagtcctctggggctcctctttccctcacaccccaggtaagagctgtctgctgatcacaataattccaaatctgacctcttctcactccgcctggtcctgtccactgttacctcttgcctggaccagcccagcagcctactccctggtctctcagcccctccttccctcctcccaaggagcccgtgaacacccctatcagttcacatccatagctccatctcactcagggtagaagcaaagtccccatggccagccctcaaggccccacctgatatggccccatcagccctctgacgtccttgcctactctgcctaccactctctcttacacgcctctgctccagccaggttctgcctcccagccttggcaatgtctgattcctctgcccctgatgcatttccctctcttttttattttctctgagacagggtctcattctgttgtccaggctggaggacagtggcgtgaacacggctcactgcagccttgactttctgggctgaagtgatcctcctgccttagcctcctgaggagctgggaccacaggggtgagccaccaaaccccactatttttttttttttttgagacagagtttccttccctcttgccacccaggctgcagtgcaatggcatgataccggccaagcctggctaatttaaaaaatttttttaggccgggtctggtggctaacccctgtaatcccagcactttgggagactgaggaggccagatcgcctgaggttaggagttcgagaccagcctggccaacatggtgaaaccccatctctagtaaaaatacaaaagttagctgggcatggtggtgcatgcctgtagtcctagctactcaggaggctgaagctggagaattgctggaacccttgaggcggaggttgcagtgagctgagatcgcgccacggcactccagcttgggagacagagcaagactccatctcaaaaacaaagcagaacaaaacaaaacaaaacaaaaaaaacacaaaaattagccaggtgtcgtggtgcatgcctgtaatcccagctattctcaggaagctgaggcaggagaatcccttgaacctgggaggcagaggttgcagtgagccgagatcgtgccattgcactccagcctgggtgacagagcaagactccgtctcaaaagaaaaagaaaaaaacattttttttgtagcgatggaggtcttaccaagttgcccaggctagttttgaactcccgggcttaagcgatccttccatctcgacctcctaaaatgctgcgattacaggtgtgacccaggaccctttgccatttccctctcgtagccacatggctccctgttttctttgcagactttgctcaaaggtcacctttccatgcagcttttcttgactgtcctgtttaaaattgcaaaatcctgtctcccccagcccagtttaccaatcccttttcttggggccttgttttctccctaggacccttcccctgccaccacacgctagagttatcctgtgactctatcacatttcctgctccaatcccagcccttagaagcatctggaacattgtaggtacttactaaatatttgttcaggaattagctttcaacaagctataacttggccaagctacaccagctgacatttatagaacttttacctcaagccaagaactatgctaaatatttttaggagcagtttggtgaatagttaaagagcttgggttttgcctaaagtcaagtactggatcgaccactggccagcttcttgtttcctcatgtgcaaactgggatgatataaattgttcaaaggctgggcagagtggctcacacctgtaatcccagcactttgggaggctgaggtaggaggatcagttgagcccagcagttctagactcacctgggtacgatggtgagacctgtctctacagaaaattaaaaaattagccaggcgtggggacctgtggtcttagctgcttagaaggctgaggcgagaggatcgcttgagctcaggagttcgaggctgcagtgagctgtgattgcaccgctgcactccagcctggacaacagagcaagaccttgtctcaacaaaaagaaataaataaatagtttgagtaatgttagtggttataaaaaggtgtgtcacagagaccagcctgggcaacaaagccagactctgtcgcaacaaaaaaattttaaaaattagatgggcatggtggcacatgcctgtggtctcagctactcaggaggatcccttgagcctaggagttggaggcggtagcgagctatgatgacatcattctcactgcaacctccacctacaagtttcaagtgattctcctgcctaagcctcctgagtagctgggattacaggcgtgtgccaccacacctggctagtttttgtatttttggtagagacggggtttcaccatgttggccaggctggtctcgaactcctgacctcaagcgatccacctgccttagcctcctaaagtgctgggattacagcgtgagccactgcgcctggtctaggatttcctctttacagatgagaaaactgcggtgcagagtgtgaagtgggtttttgtctgcagcctccagtctccagttcacaatctcaaatccagtctctaacttacccctagtttcttttttctttttttttttgaggcagtctcgctctgtcacccaggctggagtgcagtggcacgatctcagctcactgcaagctcctcctcccgggtttacgccattctcctgcctcagcctcccgagtagctgggactataggcacccgccgccacgcctggctaattttttgtatttttagtagagacggtgtttcactgtgttagccaggatggtctcaatctcctgacctcgtgatccacccaccttggcctcccaaagtgctgggattacaggcgtgagccacagcacccggctgttttgttgtgttttgagacagggtcttgctctgcagccaaggctggagtgcagtggtgccatcacggctcactgcaacctctgccttctaggctcaaaggatcctcctacctaagcttcccaagtattggggaccacaggtgtgtaccaccacacccagctaattttttgtattttttttttgtagagatggagttttgctgtgttgcccagactggtcctgcactcctggacgcaagcaatccgcccaccttggcctctcaaagtgctaggattacaggcgtgagccactgtgcctggccttactctgggtttctttctaatcctctcagatgcctccataaaaaacaatcctccccaagccctaatggataaactccaagctccttagatgacaaaaatctttctaatcttttaccttgacatttgaatatggagggaagattaaactctaataattagaggctggaagataattaaagtgtgacaatagcactgtggtgctggaagagaaaagtcctttttcttgggacttgccgaaggtgtctgtgggtgtgcaactccatttcaaatagtttaggaagtctgggcgcagtggctcatgcctgtaatccagcactttgggaggccagatcacttgaggtcagaccagcctgcccaatatggtgaaaccccatctatactaaaaatacacacacacaaaattaaccagatgtggtggcaggcacctgtaatcccagctactcaggaggctgaggcaggagaatcccttgaacccaggaggtggatgttgcagtgagccaagatcacgccactgtattccggcctgggtgacagaatgagactctgtctcaaataaaaacaaacaaacaaaaaacccaaatagtttaggagaacaaaaacaaaatctatttgtgtatgtgtatgtgcatagataaaccaattacaaaacacaatcacaattttaaaatcaggaatatggctgttggccaggtgcagtggctcaggtgtaatcccagcactttgggaggctgaggctggtggatcgcttgagtccgggagttcgggaccagcctgggcaacatggcgaaactctatctctaccaaaaatacaaaaattagccagccttataacccggtctcaaaataaataaataaatagatagatagctacaaacttaaaaataaaaaaagaaaaggaatatggttgttcacacgactattaacttttctgtttaaaaatttttataataaaaagttaaaaagtatattgaggacctacacattgaagtaagcagccatgatgtatgtaagctaacttcaaatgggtcagaaaaaaaacattgtgtgtctgtgaacagaggacggtaggtgtactggtgtcctttcaatttttctgtaagtttaagatcatttccagataaaaagttaagctggactcaatggctcatacctgttgccccagctatttgaggggctaaagtgaggggattccttgagcccaggggttcaagggtacaatgagctatgatcaggccactgcactccagcctgggtgacagagcgagaccttgtctctatgtttgttttttttttaatgaaaaaaaaaatcctggcacacctaagactttaatatttagaaaacaatctaaacaaaaaaaaatgagaaaaaagaaagcaaattaaatcaattttacaggtttgtctttttcatggaagcaaaacttaaccagttaaattggtttttaagacatgggagagtctggacgtggtggcttatacctgtaatctcagcactttggaaggctgaggtgggaggactgcttgaggccaggagttcaacatcagcctggccaacatggcaaaaccttgtctctaccaaaaatacaaaaattagcagggcatggtggcaggcgccggtaatcccagctactcaggaggctggggcaggagaatcactgtgggccacgatcttggtcccaggcaccatgaacccgggaggtggagtggcggttgcagtgagctgataccacgccactgcactccagcctgggcaatggagtcagacttcatctcaaagaaaaaaagacatgggagaaaaaaacaaaactaaaattaacagcagaccattccaatctgcgaacaaaagtaagaccttgtctctacaaaaatatcaaaaaattagccaggtgtggtggtgcatgcctgtagtcccagccgcttgggaggctgcagtggggaggatcacttgaacccagactgaggctgcagtgagccatggttgcaccactgcactccagcctgggtgacagaaagtctcaaaaaaaaaaaaaaaaagtgaaccattctgaaatcgcaagtttactcgtgtattacttttccatttcagagcttgaggaaaaaagccataaatgattttgcttcctaccctccaactaggtctggcctccaggcctctttgcttgctttgtcctctgcctggagtgtaattacaatcatcaggcagccctccctcatgccacttccctttccagggaggcaatttgtgtcatgaaacacacttgaggtcaggagttcgagactagcctggccaacatggcgaaaccctgtctctactaaaaatacaaaaattagctgggcatggtggtgcacacctgtagtcccagctacctgggaggcagaggcaggagaatcacttgaggcaggagaaccacctccgggaggcggaggttgcagggagccaagatcacgccactgcactccagcctgggcatcagagcaagactctatctcaaacaaacctcaaaataactataaataaataaataaataaataaatgattatacagggcaactatttgcttaatgtctgtgtccccataatcgggagctctgtgagggcagagacctagtgtctatccacagctctatcacttcctctgggaggcctaccctgacctctctcagcctaagtcggacgcctcctctgggctcccatagtcctgtagtttctcccattgtggccctatcccctctgcctgcctcccgatcccagctccgatgatctggatgtcagtttgatcatggatctgtttaccacctctctctgtgagccttgtgtgagcagggcccagggctgtacaggtcaccactgtgtccccagcatcacccagtaaggttcaggcacacagctggtgttcagtaaatgcacagtaacatggaatggcttcagcgtcacctttcagaggcccctgggctgcctccccagtaccccccagttcagccccacctccatgatcccaccacccacccgaggtgcaggccacgaccttgtccacaccatgagccttcatggctgccacaatgttccgggcgccctcggacatcactgtcgtgggaccttagaggggacagagagtggctgtcactggtgggcggcggcggcggcaggggtggcaggggcggggccgggggcgggggtggcgctgggggccgaggtgtaggggagggccgtgggcagagggggggctcagtactgaggtcattgcgggtgcccagcagcacgatgacagcgtcctgcccagccacggtcttgtccacatcggctgcctgcagaacatctcccactaccacgtgggccggccggggcccctctgatggcagcctggaggagtcccgcaccagcactgtcacttcgtaacctgtgggcaaagaggagcagagagcctggtcagtgggctggcactcttgggctccaggagctgggtcctagaagccaccatgaactctcaaatccatcccctcctctgttctggggaagtggtcttcaaacatttttggttttttctttttgtttgttttgtttttgagacagggtcttgctcacttgcccaggctgctgtgcaatggtgcagtcacagctcactgcagcctcaacctccggggttcaactgatcctcccatctcagcaccccaagtagctgggaccacagtgtgcaccaccacacccagctaattttgcaatcttttgtagagaaggggttttgccatgttgcccaggctggtcttgaactcctgggctcaggtgatctgcctgcctcagcctccccatgagccactgcgccgtggccttcaaacatttttgctggcatacctacagttgatgcttagtattgggctgattattaaaatagaccataccttggccaggcatggtggctcacgcctgtaatctcaacactttgggaggctgaggcgggcagatcacctgaggtcaggagtttgagaccagcctggacaacatgatgaaaccccattgccactaaaaatacaaaattagccaggcatggtggcacatacctgtaatcccaagtacttgggaagctgaggcaaaagaatcacttgacccgacaggcggaggttgcagtgagcagagattgcaccagtgcactccagcctggatgacaaagcgagactctatctcaaaaaaaaaaaaaaaaaaaaaaaaaaaaaaaaaaaagaccataccttcatgataattcataaataatctgaactgaagcctccaagcaccacaccctgtaaattccttaccttctatttattattattattattttttgagacggaatctcactctgtaacccaggctagagtgcagtggcacaatctcggctcactgcaacctccgcctcccgggttcaggcacgtgccaccacacctggctatcattattattttttttgagatagagtctccctctgttgcccaggctggagcacagtggcatgatctcagctcactgcaacctccgcctcccaagttcaagcgattcttttgcctcagcctcccgagtagctgggactacaggcgcatgccaccacatccaactaatttttgtgtttctagtagagatagggttttaccatgttggccaggctggtcttgaactcctaacctcaggtgatccacccaccttggcctcccaaagtgctaggattacaggcgtaagccactgtacccagccagcaacttccctaccctctaacaactaaagggttaatgcaggcattgcactggtctctgtctcccatccatggtcctggaagaaactgaggttctgagggggacatgggttgcctacagactgaccagtgctgggattggtcccagcccctgctgcccagccttactgctgggaagcccagccctcctttagtggtcattaaagatttttaatattgtcttagtatgttccttcccaaaataattttggataattttgtttctcttcaacacacacacacatacacacacattttaaagttcacaactaacatatttcttcctttgttttaaacattggcaaaggatgttaacatttgggtatactgtaatagcaacatatatatatatatatatatatatatatttagagacagggtcttgctctgttgcccaggctggagtgcaggggcgccaatcatagctcactgtaacctcaaattcctgggctgatgcctattataatcccagtgctttgggaggccaagacaggaagattgtttgaggccaggagtttgagaccagactgggcaacatagtgaaaccccgtctctgcaaaaaaaataaaaaaaatctagccaggtgtgctggcgcaacctgtagtctcagctactcaggtggctgaggctgtagtgagctatgattgtaccactgcactccagcctgggctacagaacaagactctgtctcaaaaataaataaataaattaaattaaattaaattaaattaaattaacaaaaagtttaggctactacctggcacagaaataagagttacctggtgctgggcgcgatggctcacgcctgtaatcccagcactttgggaggccaaggcaggtggatcacctgaagttggaagtccaagaccagcctgaccaacacagggaaaccccgcctctactaaaaatacaaaattagccaggcatggtggtgcatgcctgtaatcccagctacttgggaggctgaggcagaagaatcgcttgaacccaggaggtagagattgcagtcagctgagattgtgccattgcacgccagcctgggcaacaagagcgaaactccgtctcaaacaaaacaaaacaaaacaaaacaaacaacaacaacaacaataaacataaaaaaccaaaaaacccaaaaagacacaataaaaaaattaaaaaaagagatggggttttgcatgttggccaggctggtctcgaactcctggactcaagtaatctgcctggcatggcctcccaaagtgctgggattacaggcatgagctaccgagcgtggcctattacaccttgtaaccattttgcaactttatctcctggcctgatccaggcctacgtctccttcctggtccctttcctgggtcctccctgggctcctggacccagtcctgccctctccaatccatattccacacagcagccagacagagttctccacagtaatatttaagtgcctctctgctcagttgcctcccgcaagcctgaaatgccctgtgataaaacccatgctcctcatgccagccttccaggcccctcgggatctggcttctcctctccaggctctgctgaagcctctgccctcttcacccacagcacatttttttttttttttttctgagacggagtctcgctctgttgcccagtctggagtgcagtggtgcagtctcggctcactgcaacctccgtctcatgggttcaagcgattctcctgcctcagcctcctgagtagctgtgattacaggcgcctgccaccatgcctggctaatttttttgtatttttagtagagatggggtttcacgatgttagccaggctggtctcgaactcctgactgtgtgatccacctgcctcagccccccaaagtgttgggattacaggcatgagccactgcacccggccccaactgctcttctttcagttcctcaaatgcatggtgctgcttcctgcctcctggactttgcacgtgctgtgccctctgcctggaacaccctttaccctctttacccggtccccccagtaacttgtacttcctctgtcacagccctctttatgctgacctgcagcaaaccaagcaccctgtgggtccagggactgtgtcatgttttctgccatctccctgaacctttgtaaacacaaaagcacaggcattactgccccagggaccttgatccaaactccagctctgccacttaccagctgaggaacctcatgcaacctcttccgtgattggacctcagcttcctcatctctgaagtgaggatcacagcaccagcctccccgtgctatgtgaccacctttcataggggaatgacacaagatctgtgctgccctcacacatgggggagcagcaggggcttgcatgggccaatatgggcattctttttttttttttttttgagatgaagtctcactctcttgcccaggctggagtgcagtggcgcaatctcagctcactgcaacctccgcctcccaggttcaagcgattctcccacctcagcctccagagtagctgggattataggtgtgcaccacaacacccggcgaattttttgtatttttagtagagatggggtttcacggtgttagccagggtggtctcgatctcctgaccttgtgatccgcccaccttggcctcccaaagtgctgggattacaggcgtgagccatggtgcctggcctctttttaagctttttgaaaatctcagccattggccgggcgtggtggctcacgcctgtaatcccagcactttgggaggctgaggcgggcggatcatgaggtcaggagatggagaccatcctggttaacatggtgaaaccccatctttactaaaaatacaaaaaaaattagctgggcatggtggcaggcgcctgtagtcccagctacttgggaggctgaagcaggagaatggctgaactcgggaggcggagcttgcagtgagctaagattgtgccactgcactccagcctgggcggcagagtgagactcttgtctcaaaaaaaaaaaaaaaaaaaaaaaaaaatcagccatcaatacaaaaaatttcattgcctaacctggtgtacacaaacgcatacatatataattaaaatgagtttcacaaaactaatacttaacatgtgatacattttgatactatgtcatcatttgttaccctatattgttgatacacgttgtgaccatatgtttcagatctcattgtaactcacagtttgagaagcatcaggttgcaacaaccctgcaaggtaggtatcattatcctgtccacattgatggggaaactgaggcaattttaggcaaccgggccaggatcacacagctagtaggtagagaaggttgaatttttacctaagtaagtctgatccagagactgcaaaattcaatgctagtctaagtacctcctatataagatctcatttaattatcccaagagccctagggcaagtactaccagttttgtcatgatcttacacatatctaggtacacagatgacaaggcatttggtcacaaaggctgtaagccgcagagctggtgacttgaatgtgggcaggctggcaccagagttcatgcctgttaagactcttggccctacagaaccattgtgaactccagttaatccaagccccttctccctccctccctccctccctccctccttccctcccttctttccttccctccctccctccctccatccctccctccttttcttccttccttctttcctttcatcttgctgtgtcacccaggctggagtgcagtggtgcagtgatgcaatcttagctcactgcaacctcccaggttcaagcgattcttgtgcctcagcctcccaagtacctggaattacaggcacgtaccactgtgcccagctaatttttttttttttgagacagagtttcactcttgtcgcccaggctggaatgcagtggcgtaatctcggctcaccacaacctctgcctcccggattcaagctattctcctgcctcagtctgccaagtaactgcgattacaggcaccagccaccatgcccggctaatttttcgtatttttagtagagacggggtttcactatattggccaggctggtctcgaactcctgacctcgtgatccacctgcctcagcctcccaaagtgctgagattacaggcgtgagccaccgcacccagcctctttttctttctttttatgtatttttttaaatttgagagacagggtctcaccctgtcacccaggctggagtgcagtggtgcaaacacagctcactgtagccttgaactcctgagctcaagcaatcctcccacctgagccttctgagtagctgggactacaggcatgcatcaccacgcccagctaatttattttttttttgtatttttgtagagatggggtcttgctacgttgcccaggctagtctcaaactcctggcctcaagccatcctcccgccttggcctcccaaagtgctgggattataggcatgatccaccgtgcctggccagcccttccctttgctgagggggacagcaaagctgagagctgggaagagatttttcagagccacagctctgaagctccctaggctccagttcttaaccctctgagtgcagtcccagctatgaccagcagggtgggcgagtggaattcggtggaattagtggatttccaggtgactcagcgcctctcaacttctctctcttacttccttctccattactcccgaataaatgcttatcagcaaactggtttttactgagaggcccacagctccccattctccacaagtcaagatcctcacgtggtctccctggggaaggggagagttatggacctagagaagaactttcagagtccctccaagggagacagcagagtggggtcctgttggcctccacccttttggggcacgcagatagtcaatatcttcagcgtccccaaggcctgcaagggtggggccccatatctggaagtcccaggcccagctgggagttggtcaagtctgggctgtgggggcagggagtgctgggggatggttatccccttttctgccctctctcctggggcaactccaaattttcagccctcattgactttcccaggactgctgtccccaagtcttcactcatgtctctctgtgactccttcccattaggtactcgcagcaacctgaccccccaactttttcagtttccagcctggggacttgtggtggttaagagcatgagctgagttcaaatcccagtcctgtcagttaacagctgtgtgatattgggcaagtcactctctgggtctcagttttctcatctgtcaagtagggtgatactagttcccaccccattttgaaagctctcatgtgaagagacgacagagcaagcttggcttagtaaatcctctctgggagtgcgaacaaccaccaccacaaccacaataatgacaaccgcattgcataagagccctggacttacacacgactgtgccagtggagtcctcccggggctcccggggccaattcctctctggcttggactcacataaacttggatctcacatctttccccatttctgcccccgtggccacttgctttggcccctgagtcctcatacacctggctggggcgctcatggccccaatcagcctcggcccgaccccatggtgccccttcctaaagttctgcccgtctgtcccgtgacatgccccgcccgccccggctcatgcctgcttgcaccgcctgcgccagggtggtgagcccggtctggccagtggcgccgaagatcgcgatcttcttgacggccatcgtacgggatcgtgggggtgcaaggcctcagagtctcggcacgcgcgggaacccactggctgctgggcggtgctctctgccctactcaagccaggaacaacggggcggagctggctcgaagggccacgcctcagactctccgcccgcggctcaggtcaaggggcggggcctaacgcggatgggcggggcaggcgtcagcttgcattcgctcaccgtccagcaccgccctctctgcgcgccacttagactggaaggcggggccacagaaggccacgcctccacatagcaacaaatagagtggacggagccgagataacttgtcactcagcgccctgcctccgcgctccacctcccggagaggggcggggccaggcgagcctcacccacggcctctcgtagctcacgccccctctcccggagcctggagcggatctggggcgcactctaagccccagggcctcccagaaccagcaaggggagaaagttaggaggacagagtgtgtgtgtgcacttggatgtaagacactgtgtcacggcgtacctatgcacttatatgaccctgtgtgactcagtgacccggagggcaagcaggactgtgggtgacaccttgtgtcatcctctgagtgtgatcccgtgttacagtgtgactacacgtgcgtgacaccacgtgtggcaggcattgattctgttcttttgtgaccttgtggtgacaccgtgggtgacactgcgtcagcctgtacgatagggtgtgggacgtgtgaggtgtgctacatggaagcgtgagactaattagactgtgacagtgtgtgacaccacatgtctcgtgtaaggatgtgtgacaccgggaccccattcgagtgtgtggctgtgggtgtctgtgttgagctgctcattgtgaccccctgtgactatgatgtgtgaggtgcggcggtgcagcatgtgcggggcgactgctatgaaggttcgagtgtgtagagtgtgtgacactgtggctgtgaagctgtgcgtgatgtgtgggcctatgacactgtttgtgactgccggggagtgtgcggctgtgtgtgacaggtgcatttgtgtgtgacgccgcgtgggcggtggttaccctattggatttgtgtggtggtgggtgacaccgttccagtgtggacgccgcgtgtgacggcgtgagggtgtgaccccgtgagaccccacaggagggagtgacggcgcgcaagcgcgtggatgcgggggtgagtttgtgcgccgaggcccccgcgagtatggcagcgtggcgagcgtgaccccgtgggagtgtgcagcgcgtgacgccgccgtgccctcgcgagtgcagccgtgcaccccacgccgcggccgggtgtgactgcgcgtgggcctcgggcggcggggcgcggggaccgcgggcgggagggggtcccgggggcgcgctgagcgcggcggcggcgcgagagagggaggcgcggcggcgcatgcggatctggctgagccgcgggccggcggggccgagctgagccgggctgggccgggccgggccgggccgggcagcggacgccgacagggagggcggtcggtcgcggcgagcagcggagacagcgacgctggcggccgcgggcccaggtgagctgctaggggggccgacagcccctcccccaagtatgtccccacctggcgagcatccctcctccgcgcgcacggggcatggctggagccccgggtctccccggctggagggaggcaaagggtcgagggcaggacgagcccacaacccccccacccggtctagcttccgcgccacgcgtgggtcttacccccaggccttgtccttcccaggccccctccttgggcgcagtgtctggaccgcagggagagaggcgcggcctgggaagggttaaagcctctgatgccaccgcagcccagcgccccaccagcctttgcgggggggggggggtgttggggggaggctcgcaggacaccccttcccggcttccctattacctgctcccttccttcccattcaatcgcgttatggccagagctgatcctcggcctggccagagggctaacaggagtgctaagggcctccccatctctaagtgtcttccactgaagaaaacagctgtaaccaccgtttaacagggagggaaactgaggcacagaaaggccaagttaaagatactcggttaaagatacagcaagaataaagcggaacttgaactcatttctgtctgactccagaagaggcaaatcgatttgctgagatgtgtgaggaaaagatgaagaataatagcaaggaacatgtatcaagggcttgcagtgtaccagataccatgatccctgcattaataacttacctcttcaaacaccgctaagaaacgggtacgattatcattacttttttttttttttgagacggagtttcactcttgtcacccaagttggagtgtaatggcgcgatcttggctcactgcaacctctgcctcccgacttcaagcagttctcctgcctcagcctcccaagtagctgggattacgggcatgagctaccatgcctggctaattttgaatttttagtagacatggggtttcactatgttggtaaggctggtctccaactcttgacctcaggtgacccacccacctccttggcctctcaaagtgctgggattataggcgtgagccaccgcctggcctacccttttgtgtgtgtgtgacagagtttcattctgtcattcaggctggagtgcagtgagtcaatctcagctcactgcaacctccatcccccaggttcaagcgattctcctgcctcagcctcccaagtaactgggactacagacacgtgccaccacgcctggctaatttttgtattttttttagtaaagaccgggttttgccatgttggccaggccggtctcgaattcctggcctcaagtgatccacctaccttgacctcccaaagtgctgagattataagcatgagccaccgtgccgggccatcattactattttgcagatgaacaaactaaggcccaaagagtggaagtatttcagccaaggtcacacaggtggtaggtagctgtgtgctcactttcacttttccatggaaggagggaagaacaaaaatggatttgggactgggcacagtggctcacatgtgtaaccccagcactttgggaagttgaagtgggcaaatagcttgagcccagatgtttgagaccagcctgagcaacatagtgagaccccctctctacaaaaaatacaaaaattacctggtcatggtggagcttgcctctagtcccatctactcaggaggctgaggtgggaggatcgcgtgagcacaagagttggaggctacagggagctatgattgtgtcactgcactctagcctgggtgatagagcaataccttgtctcagaaaaaaaaaaaagatttcaatgtgtccccctaagggacaatttccactctactcactctactgaccaagacttagaccctgccttcctagaattcagtgggttggcaattgtctgggtcttttgaggacattgatctcccaacttcctcctttgttagtcttttttttttcctttttcttttgagaaggagtcttactctgtcgcccaggctagagtttagtggcacaatctcggctcactacaaccttcgcctcccggtttcaagcaattctcctgcctcagcctcctgagtagctgggattacaggcacctgcaaccttgcccacctaatttttgtgtttttagtagagatggggtttcaccatgttggccaggctggtcttgaactcctgacctcgtgatccacccgcctcagactcccaaagtgctaggattacaggtgtgagccaccacgcccagccgttagtcttagaatcaggcctgggggcccagaaggtaaaggagatacatctaatgtcacttaaccctttaaatttcttctctttttttttgttttttttgagatggagtctcactctctcacccaggctagagtgcagtggtgcgatctcggctcactgcgacctccgcctcctgggttcaagcaattctcctgtctcagcctcctgagtagctgggattacaggcatgtaccaccatacccggctagtttttatatttttagtagaggcggggtttcaccatgttggccaggctggtctggaactcctgacctcaggtgattcacccaccttggcctcccaaagtgctgggattacaggtgtgagccactgtgcccggccaatttcttctttttttaaataattttttgttttctatttttttattttcatttaatttaattttattttttctgagatggggtctcactctgtcgcccaggctggagtgcagtggcacgatctcagctcactgcaacctctgtctcccaggttcaagcgattctactgtctcagtctcctgagtagctgggattataggtgcacaatgccatgcctggctaatttcttgtattttagtagagatggagtttcaccaagttgcccagactggtctcgaacccctgagctcaggcaatccacccgccttggcctccctaagtgccaggataacaggcatgagccaccgtgcccggcctatttttatttttttatttttgtttgagatggtgtctcgccctgttgcccaagccggagtgcagtggtgccatcttggctcactgcaacctctgccttcccaggttcaagcgattctcctgcctcagcctcctgagtagctgggattgcaggcatgcactaccatgcccagctcatttttgtatttttagtagagatggggtttcaccatgttggccgggctggtcttgaactcctgacctcaagcgatctgcctgccttggcctcccaaagtgctgggattacaggtatgagccactgtgcctgccccctccactttaaatttttcttcttcttcttcttctttttttcttgagaatgagtcttactctgtcgcccaggatagagtgcagtggcacaatctcagctcattgcaacctgcgcctcctgggttcaaacgattctcctccctcagcctcctgagtagctgagattacagtagcccgaaaccacacccagctaatttttgtattttcagtagagaccgggtttcaccatgttggccaggctggtctcgaactcctcacctcgtgatccgcctgcctcggcctcccaaagtgctgggattacaggcaggacccactgtgcccagccccattaatgcaaatattctatcaccttttttttttttgagacggagtcttgctctgtctcccaggctggagtgcattggcatgatctcggctcactgcagcctccacctcccaggttcaagtgattctcctgcctcagcctcctgaatacctgggattacaagtgtgtgacaccacgcccagctaatttttgtatttttagagacagggtttcaccatgttggccaggccggtcttgaactcctgacctcaggtgatctacccatctcagccccaaaaagtgctgggattacatgcatgagccaccgcgcctggccctatcatctatgtttgaatcctagatactaactggctgtgtaaccttggaaaaatagatcaactcctctgtgcctcagtttcctcctctgtaaaataggtgtaataatagccaactgttagggaattaaatttgtggaaataataagagaaggtacatgaagtactgaccacagtgcaagtgttcaatatgttcattattgttattactgcattacagaactctattgttctaataataacagtgacaatttgctgagcccttaatatgtgccaggggctaagccatgtgttttatcacatcctgtgaagtggtgagggtgaacattattattattattatttagaaatagggtatcgccatattgcccagtttggagtgcagtgtcactattatagatcactgtagccttggcttcttgggctcaagccatcttcctgcctcagcctcctaaatagctgggactacgggtggcaaccaccacatttggctaatttttaaatttttttaaaagacagtttctggctctgctgcccaggctggagtgcagtggcgctatcttggctcactgcaacctccacttcacaggctcaagccatcctcacacctcagcctcctgagtagctgggattacaggcacgttgccaccacatccagctattttttttttttttttttttttgagacagagtttcgcttttgttgcccaggctggagtgcaatggcatgatcttggctcaccacaacctccgcctcccgggttcaagcgcttctcctgcctcagcctcccgagtagctgggattacaggcatactccacctcgcctggagaattttgtatttttattagagacagcgttctccatgttggtcaggctgatctcgaactcccaacctcaggtgatccgcccgcctctgcctcccaaagtgctgggattataggtgtgagccaccgtgcctggccaatttttgtatttttttgtagagacagggtttcaccatgttgcccaggcttgtctcgaactcctgggctcaagcaatccgccctcctcagcctctcaaagtgttgggattataggcctgagccactgcgcctggcttatttttatttttatagagatgaaatcttgctatgttgcccaggctggtctccaacccctgggctcaagcgattctcctgcctctgcctcccaaagtgctgggattacaggcatgagccactgtgcctaggccttatcattgttattatgtccactttaaagacagagaaattgaggacaagagaggggacaggactcaaagccagtcactgttagaaatgagacttgatcctagacctaacctacctctccctatgtccaggcctcaccttccccgatggcgcaggtaccaggggaagtggacaacatggagggcctgcctgctcctaacaacaaccctgctgcccgctgggagagtccggatcggggctgggagcgggagcagccggctgcgtccaccgcagcggcctcgctctttgagtgctcccggatcaaggccttggcaggtacctggaggagggctggggtgggatgaggaggagggggaagggggaagggtgcccgagaaccttggtggctgggagggtgggaaaagagaccagcactgtccaatagaactttccatgatggtggaaatagtctatatccataatgtaccatataataatcactagtctctgtgacttttgaatgctagaaatgtggccagtgctatgtgacagcctttgagttttaaattttatttagttttaattaaatttatttatatatatattttttgagacagagtcttattctgttgccccggctggggtgtagtggtgagatcttgggtcactgcaatctccacctcaccggctcaagccatcctcctacctcagccccctgactagctgggactacaggtgcccgccaccacacccggctaattctttttgtatttttagtagacaccgggtttcactgtgtttgccaggctggttttgaacttctgatcttaagtgatccacttgctttggcttcccaaagtgctgggattacaggcatgagccactgcacctggcctggtgttttttttttttttttttttgagacggagtttcgctcttgttgcccaggctggagtgcagtggcgcgatctcggctcaccgcaacctccacctcccaggttcaagcgattctcctgcctcagcctccctagtagctgggattacaggcatgtgccaccacgcccagctaattttgtatttttactagagacggggtttctccatgttggtcaggctggtctcgaactcccaacctcaggtgatccacatgtctcggcctcccaaagtgctgagattacaggcatgagccacggcacccggcctgttttaattaaatttaaatagccacatgtggcttgtgactgctgtataggtcagcacagccttagagccttagaaatgtacagtcccagaatggtgggactctgtaagcatattcccttagaatcccgaaatgcagagccatcagatccttggaacttgaaatgtctaagagattcttagacctcttgaaatgaagacctctggcctggcgcggtggctcacgcctgtaatcccagcactttgggaggcaaaggtggacagatctcttgagtgcaggagttcgagaccatgttcgccaacatagtgaaaccctgtctctactaaaaataaaaataaaaaaaaaaattagccaggcgtggtggcatgcatctgtagttccagctatttgggaggctgaggtgggaggatggcctgagactgtgaggtggagattgcagtgagtcaagatcgcgccactgcactccagccccagcagtaaagcaagaacctatctcaaaaaaaaaaaaaaaaaaaaaaaaaaaagagctttggaaatgtgaaacgttatcatcacagacctaagaaattttagtcattgttccctaggatcataggcccttagaaactgaaactgtaatacacaggaacctttgggacttgataatactaaacctttggagtttccaattagaaatgtggatcttgagaaatctgacatagagtgaccaaaaccttcctgcttttaccaccgaaactctcagccttgggccaaccagtacagtgggtcaccctaccattttttttttttttttgagtcagggtctcactcttcacccaggctggagtgcagtggtgtgatcatggctcactgcagccttgaactcctggactcaagtgatcctcccacctcagcctcctgaatagctggaactacaggcatgcgccaccatgcctggctaattaaaaataatttttttttttggcgaagcatggtggcggatgcctgtaatcccagcactttgggaggctgaggcggatggatcacttgagatcaggagtttgagaccagcctgaccaatatggtgacactactaaaaatacaaaaattagatgggtgtggtggtgggcacctgtaatctcagctacccaggaggctgaggcaggagaatcacttgaacccgggagatgggggtttcagtgagctgagatcacaccatttcaatccatcctaagtgacaagagcttaactccgtctcaaaacaaaacaaaaaaatttttttgtaagatggggtcttgctatgttgcccaggctggtgtggaactcctgggctaaaataaccctcccacctcggcctccgaaagtgctttgattacaggggtaagccagagtgcctagtagtcaccctactttgatgtatcagaacaatattagcaaagaccagagaactttatagttatagaaagaccttagacctttagaactgtagacccttgaaccttagtacttagtattcatagaggtctggaaccttagaagtgtttaatcatcagcattaaaactggcaaagaccctgaggagcctcagagatatggaacgtcataatcataagcctttaaaacatgacaccctagcacctttgacccttgggaccttaacatcttagaaacacggagcgctagaatcataaaatatagatgatcataatcatgaattcttaaaacccaaaggtcagaatcagttccctccaaatcttagaactttagtaactcagcagtttataatcacaagatggatctctgatactaagatttttggaactttatttatttatttatttatttgaggtggagtctcactctgttgcccaggctggagtgcagtggcgcaatgtcagctcactgcaacctccacctcccaggttcatgagattctcccgcctcgggagtcccgagtagctgggactacaggcccgcaccaccatgcctggctaatttttgtatttttaattgaggcggggtttcaccatgatggccaggctggtcttgaactcctgggctcgggcaatctgcccaccttggcctcccaaaatgctaggattacaggcatgagccatggcgctggctcaagaaacctggctgatctagaaacctgtagtcccagcactttgagaggccgaggcgggcggatcgcttgagcccaggagttcgagaccagcctggccaacatggtgaaaccccgtctctactaaaaatataaacattagccaggtgtggtggcgcatgcctgtagttccagctagtcaacaggctgaggtgggagaatctcctgagcccgggaagcagaggttgcagtgagccgagattgtgccactgcactccagcctgggcaacaggttgagaccctgtctcaaaacaataagaaacctggttaggcgcggtagctcacgcctataatcccagcgctttgggaggccaaggtggggggatcactggaggttgggtgtttgagaccagcctggccagcacggcaaaaccctgtctctattaaaaatacaaaaattagctgggtgtggtggcgcgtgcctctaatcccagctactcaggaggatgaggcaggagaatcgcctgaacctcagaggcggaggttgcagtgagcctagatcgtgccattgtactccagcctgggcgtcaatagcaaaactctgtctcaaaaaaaaaaaaaaaaaagagagagagagagaaatctgtatatgccacaaagtatgaaccagattcaactggtggattgccagctttgtctgatctagaaacctagactgatgaaaacatacactcatggaaacttacagtcatacttttagagccttagaaccttaaaaaggtaggaacatatcaacttagaattctagaatttactaatttagtgtaagtgagtttgtttttagttttgtttgtttgtttttgtttttgagaaggagtcttgctctgtcgcccaggctggagggcagtgacactatctcggctcactgcaagctccgcctcctgggttcatgccattctcctgcctcagcctcccgagtagctaggactacaggcgcctgccaccatgccccgctaattttttgtatttttagcagagatggggtttcactgtgttagccaggatggttttgatctcctgaccgcgtgatctgcccgccttggcctcccaaagtgctggaattacaggcatgagccaccgcgcccgtcctgtttttagtttttgtttgttttttgaggaggagggggtctctccatgttgcctagacaggtctcaaactcccggtgtcaactcatccttctgagtagctgggattacagatgtgtaccaccactcccagctgtagaatttattattattattattattattatcattatcattattattatttggactgctgccaggctggagtgtggtgataaaaatcatagctcactacaacctccaactcctgggcttgagcaatcctcccaccgtagcctcccaagtagctgagactacaggcatgcaccatcatgcccagctaattttcttattattttatttttttatagagacagggtctcgcaatattttccaggctgaacttgaactcctggactcaagtgatcctcccaccttggcctcccaaagtgttgggattacaggtgtgaaccactggaatttattttatctagaaaatattaattcagtgcctgctgtgtgcctggctcatgctggacaacatgaggggcatagtggtgactgaggcagcctgggtcctgcccccacaggactcataggtcagtgagagagagagatccggttagacaatgatgacccagaggggtcagagacagggtaggggaggcacaggcagagaggttggggctgttgacagaaaggcacaagcatcaggctgtgatggggaagcccaaggactgtgggagcccataggatgtacttgatccagcctggagaatcaaggagggcttcttggagaaggagaggcctaacttcaggcctaaaggatgaattggcatgaacactggagtgaagagtggaagagtattctaggtagagggaactgcatatgcaaggcctccagaagctgggagtggcttgactgagaaggatacaggtgaggagtaaatgatgatgggagaggagccagtggaagccagatcctttttttttgagacggagtttcgctcttgttgtccaggctggagtgcaatgccgcagtctcggctcactgcaacctccgcctcctgggttcaagcgattctcctgcctcagcctcctgagtagctgggattacaggcgcctgtcaccttgcctggctaatttttgtatttttagtagagatgggggtttcaccatgttggccaggctggtctcgaactcctgacatcaggtgacccacctgcctcagcttcccaaagtgctgggattacaagcataagccactgagcctggcagaagccagctcttaaagggccttgcggggtaccagggagctatggaaagattttaagcagaggtgggaagattttaagcagaggtgggatatggtaagatgagaattaaggactctccaaatcttagaaccatgcttctgagagcatcttgcccagggaaatgtagaaatcccctttaagataaaaaaaaaaaatcctctccagtttgggcaacaaagcaagatcctgtatgcacaaaactttaaaaattaactggccacagtggcatgtgcctatattactctggaggctgaggcaggaggatcgcttgagcccaggaattgaaggcagtgatctatgatggcaccactgcattccaaccttccagcttgggcaacagagtgagatcccaccttaagaaattttattttattttattttttttgagacagagtctcgctctgtcacccaggctggagtgcaatggcacgatcttggcttactacaacctctgcctcctgggttcaagctgttctccttcctctgcctcccgagtagttggtattacaggcgcccgtcaccacgcccagctaatattttgtatttttagtagagatggggtttcaccatgttggccaggctggtcttcaactcctgacctcaagtggtccacctgcctcagcctctcaaagtgctgggattacaggcgtgagccacgcccggcctgtatgactttcataaatgctcacaaatgcacaactctgcttaaatctcccatgcttagggttcacatatagctctacaagtaaaacacatttatagaggaactccagaccccaaaccagtaacattcagcttaatagtaacttcatgatgctgctctcctgctgaaaccaccttgccactcaaagtgcaaatatgacgtagaccactacgctgcatttcttttgcatccctttgcccagctctctcatggtttttctcccgcttttattttgaggcagagtctcactctgtcacccaggctggagtgcagtggtgctatcacggctcactgcagcctcgacctcccaggttgcctgtaatcctagcactgaggctgagatgggagcatcacttgagcccaggagtttgagaccgacctggacaacatagtgagaccctgtctctatcaatgttttcaacattaaggaaaattgtttggaccccacgttcagtgtgttctcctactcaccctccacagtttgtggctcactactgtcattgatctgtgtgacgcctctctccaattctcttttattcccaaatctcaaatcaatttcttctcccctgtaggcaaccactgacattgttttgttttgttttttaaataaagatggggtcttgctatgttgcctaggctggtcttgaactcctgggcccaagcaattctcccacctcgacctcccaaagtgttgggaagccactgcttctgaccccattcagatagtttttaatgtgaatctttttctttgcatgagaataattttgcaaaatgtgcattgctaatgagtaagcatatatatatatatatatatatatatatttaactttttattattaaagtagttcatgacacagaatggcagataaatcatgccaatatttccacaaatgagtactctcttgtaaccagcacccatattaaaaaacagaatatacaatggggtgtggtgactcatgcctgtaatccgagtgcgttgggaaactgaggcatgatgatcacttgaggccaggagttcaagaccagtctgggcaacatagagagaccccgtctctacaaaaaaaaaaaattaaaaattagctgggtggggccaggcgtggtggctcacgcctgtaatcccagcactttgggaggcagaggcggatggatcacgaggtcaggagattgagaccatcctggctaacacagtgaaaccctgtctttactaaaaatacagaaaattagctgggcgtggtggtgggcacttgtagtcccagctgcacgtgaggctgaggcaggagaatggtgtgaacctgggaggcggagcttgcaatgagcggagatcaagccactgcactccagccggggttaacagagagagactccgtctcaaaaaaaaaaaaaaaaaaattagctgggtgtggtggcatgagcctgtagtcctagctactcaaaagactgaggtgggaagattgcttgagcccgagttccaggctgcagtgacctaagaaggtgccactgccctccaacctgggcaacagaatgagataccatctctaaaaaacaaacaaacagaatgtgacatatgacagctccagaaaagcatcctcatgccacctccctatcactacagtccaagggtgtactctcttaacttctaacagctcagcttcattttgctggtgttttaactttctgtaaatggaataatgcattgtgtgttgttttatgtccggcattattcactcaacattatgcttgtgggagattcatccatgtctccctgtgcttgtggggtggtccttctccttgctgtatagtgttgcgtggtgtgaatgtaccacagtgtgtttgtgcattcacctgttgataagcatttgggttgctgctagtttggggctactataaatggtggtgttgggccaggtgtggtggctcatgcctgtaatcccagcactttgggaggccaaggcaggcggattacttgagtccaggagttcaagaccagcctgggcaatacagtgagaccccatttctactaaaaatacaaaaaagtttgctgggtgtggtggtgcatgcctgtaatcccagctactcaggacgctgaggcaggagaatcacttgaacccaggaggtggaggttgcggtgagccaagatagtgccactggactctagcctgggtaacagagtgagactctgtcttaaataaataaatacataaaataaatggtggtgttctcaagtttctagtacacatatttggtggacatatgcgcttgtttctggtggtttacacccacgcaggagtgaagctgtccaatcatagagtaagggtatatattttattttacatatatatgtatctgttgttgttaattgagacaaggtcccgctatgttgctcaggctggtctccaactcctaggctcaagcagtcctcctgccttggctgcccaaagtgtttggattacatgtgtgagccatgcgcccggccaagtgagtgcatatctaactttagtagagactgcccgtttgtatcgttttatattcccactagcagtgtaccagagattcagttactgtgcaccccacccttgcgatggtcaggttttttgttttgttttgttttgtttgagacagagtcccactctgtcgcccaggctggagtgcagtggcgcgatctctgctcactgcaacccccgcctcctgagttcaagcaattctcctgtgtcagcctctcaagtagctgggattacaggcgcacaccaccacgctcagctaatttttgtatgtttagtagagacggggtttcgccatgttggccaggctggtctcgaactcctgacctcaggtgatctgcctgcctcagcctcccaaagtgctgggattacaggcgtgagccaccatgcccagctgatggtcagtctttttaattttagccattttggtggctgtgcattctgttgtggttttactttgcattttcctgatgactaagaacaacgaagaaggtgaagcacattttcatacatttattggccattcaaatatcctttagtgagatggccattcaagtcttttttttttttcttttgagatggaatcttgctctgttgcccaggctggagtgcaatggcacgatctcagctcactgcaacctccgcctcccaagttcaagcaattctcctgcctcagccttctgagcagctgggaatacaggtgcccgccaccacacctggctaattcttatatttttagtagagatggggtttcaccatgttggccaggctggtctcgaactcctgacctcaggtgatcgacccacctctgcctcccaaagtgctctgattacaggcgtgagccaccatgcctggcctgatttttaattttttatacaatggggtctggctatgttgccaaggctggtgtggaactcctggcctcaagcaatcctcctgcctcggcctcccaaagtgctgggataatgggcatgagccaccatgcctggcctgatttttctattcctgattacagtcttgttagcatggagcaagagttgagaactgaaatgcccaccaagaccagacgggctgcatacactgagagaactgggacctcctgtaagagggcagcggccacatagctcccgcgatggcagcctggcaggaatggaggtccagggttgccgtatcatgtgatatttcatgagaagcccaaaatctaaattttttaaagacaaagtcttcctattttaaaatgttggcaactgatttacatttttataaaacgcagtcggggtgcaaccaaatatatctcagaggctgggcgcagtggctcatgcctgtaatcccagcactttgggaggctgaggcgggcggatcacctgaggttgggagttcgagaccaacctgaccaacatggagaaaccctgtctctacaaaatatacaaaattagccgggcctcgtggcgcatgcctgtaatcccagctactcgggaggctgaggcaggagaattgcttgaacctggggggtggaggttgcaatgagccaagattacaccactgcactccagcctgggagacagagggagactccatttcaaaaaaataataataaataataaaataaataaataaaatatatatgtatacacacacacacatagacacacacacccctacctctctcaagtatgagttcccaaaatcgatgatcccccagaatccactgaagaaagccaaatctagtccaaatccctctttttgcgaatgtgaaaactggggtcccgagaggggagatgacctcgagaagtcacctggccagttattagtacagacagggcagaacccagttgtcctcattctggtaccactctagggatgcactaaaattccactttggctttagtactagccaaaacctgctatttggcatgggcatcatctgttagaaggcagaggaataaatcctcaatttaaaataattaaaagagtataattggattgtctgcaacacaaaagtatctatcccttaaatatatataactgctatgtacccactaaaattaaaaatacaattttttaaaaaaaatattgcttcttactctagcagtagaaaatatacatttacttatctgtattttttaactttaaattgcaccttgaatgtttacctctagtttgaaaacaaatatgcaaatattaacagtaaatgcaaaggaaatatcttgtttgtgtcagtgtgggttttgtgctgtttagataagatgggaccctatgtgaatactgatcatcaatcatacctgagaaagtgatggcagaaaagatgctaaattgaggatttattcctctgccttctaacagatgatgcccatgccaaatagcaggttttggctagtactaaagccaaagtggaattttagtgcatccctagagtggtaccagaatgaggacaactgggttctgccctgtctgtactaataactggccaggtgacttctcgaggtcatctcccctctcgggaccccggttttcacatttgcaaaaagagggatttggactagatttggctttcttcagtggattctgggggatcatcgcaaagctcttcgcaaagctgaggtggaacgatggcttgagcctgggaggcagaggttgcagtgagccatgatcttacatcaccgcactccagcctggattttatacagggcagaccctgtatcaaaaaaaaagagagaaaaacaagtacaattaaattattattgaatataatcaccctgttgtactgatatcaaatactagatcttactcattctttccatattttgtacccattaaccatcaccccttcccttaaccccactattgataatgttacaaaaggtaaattttatgaaaaaggaaattattgagagatttcaaatggttgaaggagaaataaactggaaatatacatctttattcctgaattaatggaaaacttaataggaaacttaatattatttagtaatgggattttaacagtaactgtacaggctaagctgccaacaaatcgacttcacagtacagtggcttaatggagaagctatttctccctcccagataacctcgagatgatcaacacagttggcaggaagacttagctcagagaggtcagtgtacattccaggttaatttcatcttgtattctgtagacattgaccttggttttccagtttatgggagtcaggggaagaaagaggaaggccaggcagcaattttctttttcttttttaaactttatttttggccaggcgaggtggctcacgcctgtaatcctagcactttgggaggccaaggggggtggatcacgaggtcaggagatggagaccatcctggctaacatggtgaaaccccatctctactaaaaaaaaattaaaaaaaattagccgggcgtggtggcaggtacctgtagtcccagctactgaggaggctgaggcagaagaatggcgtgaacccgggaggcaaagcttgcagtgagctgagatcgcgccactgcactccagcctgggcgatagagtgagactccgtctcaaaaaaaaaacaaaacaaaaaccaaaaaacaaaaaacaaaaaaaccactttattggcacccaccaccatgcccgctaatttttgtttttctggtagaggtggggtttcaccatgttggccaggctggtcccaaactcctgtcgtcaggtgatccacctgcctcagcctcccaaagtgctgggattacaggcgtgagccaccgtgcctggcctaaactttattatttatttattttggaggcagagtctcgctttgtagcccaagctggagtgcagtggcacgatctcggctcactgcaacctccacctccctggttcaagcgattgtcatccctcagcctcctgagtagctgagattacagatgtgcgccactaagtcctgctagttttttgtatttttagaagagacagtgttcgagaggctggtctcgaactcctgagctcaggcaatccacctaccttggcctcccaaagtgccagaattacaggtgtgagccaccatgcccagcctttttaaaactttagattatgaaataattacacattcataggaagtcgcaaagatagtagagatgataaaaagacatgtaactggctggttgtggtagctcgagcctgtaatctcagcactttgggaagcgtacgtgggaggattgcttgagcacagaaggttgagaccagcctgggcaacatcgtgagacccttgtctctacaaaaataaaaattaaaaaatcagatgggcatggtggcatgtgcctgtaaccccagatactcaggaggtgggaggactgcataagcctgagaggttgaggctgcagtgagccatgattgtggcactgcactcaagcctaggcggcagagtgagattgtgactcaaaaaaaaaagagtaatcctactaaaaaatgtccaagggattttaatgacgtttctccaaagatatacaactgtctgatggagcatgaaaagatgctcaacatcattagccattagggaagtgcaaaagaaaaccacagtgaggtacaacttcacgcccactaggatggccataaaaaaaaaaaaaaacagtagagggaaatgaccaagcgcagtggctaacacctgtaatcccagcactttgggaggcctatgtgggtggattccttgagcccaggagtttgagaccagcctgggcaacatagtgagacccctgtctccacaccaaatacaaaaattagccaggcctggtggcatgctcctttggtcccagctacttgggaggctgcgatgggaggatcacctgaggctgggaggcagaggttgcaatgagccaagattgcaccattgcattccagcctgggcaacgtagtgagacccccgtctcaagggaaaaaaaaggaggggttgggaaacagcaagtgttggcaaggatttggagtcctcacacattgctggtgcagcaacttttttttttttttttgagacagggtctggctctgtcacccttgctggagtgcagtggcatgagcacaggtcactgcagcctcaacctcccaaggccaagcgatcctcctgcctcagccactcaaggagatgggactacaggggcattccaccctgcctggctaattttttgtatttttttgtagagacagagtcttcaccatgttccccaggcaggtctcaaactcctgtactccagcaatccacccgccttggcttcccaaagtgctgggattacaggcatgagccaccatgcctggcctatggtgcagctactttggaaaacagtttgacagttccttaaggccgggcgcaatggctcatgcctgtaatcccagcactttgggaggctgaggccatggctgtatttatccgtgtcctctctgaactgagctctgtgagggccctgctgtattcacagagccttgaacaggcacagagtgtgcattcgaatatttattgaatgaatgaatgactagagccaactggggtcacaagcagggaaggcttcctgtgcaagtgacatgtcaggaaaacttcaagggacaggaaggttttcaccaggtgggtggcagagggtcggggaaggcgtcacaggtaggaggagacatgactgctgaggctggactctcttttttttttttgagaaggagtcttgccttgttgcccaggctgcagtgcagtggcgtgatctcggctcactgcaacctccgctccctggttcaagcaattctcctgcctcagtctcccgagtagctgggattaacaggcatgcaccaccatgcccggttaagtttctttttgtatttttagtagagacaggatttcaccatattggccaggctggtcttgaactcctgactttgtgatctgcccgtctcagccttccaaagtgctgggattataggcatgagccaccgcgcccagccgactcactctttttttttttttttgagatggagtcttgctctgtcgcccaggccggagtgcagtgatgcgatcttggctcactgcaggctccacctcccaggttcaagcaattctcctgcctcagcctctccagtagctgggattatgggcgcccgccaccatgtccggctgctttttgtatttttagtagagacggggtttcaccatgttggccaggctggtctcgaactcctacctcaggtgatccgcctgtgaggctggactcttgcagagagctgggtctgagcaggcttggctcgcggagggctggggtgaaggtggaagcgcctgggggctcatcagggcctctcctccagatgagcgggaagccgtgcagaagaaaaccttcaccaagtgggtgaactcgcacctcgcccgcgtgggctgccacatcggggacctctatgtggacctccgggacggcttcgtgctcacgcggctcctggaagtgctgtctggggagcagctggtgagggggcctgaagggctggggcaggggtcctccctggggtctcaggctgggggttgggcttctctggaagggctgaactgcaagcaggggcctggctcatgggcgagtggaacgtgctggaagggccctgtgggtaagaggtccctctactcgggtgtgtggggctgtggcgctggggcggagcttggtcgtgagaagcctgggcgcgtggctggaaccgaagctgatggctcgctagctacggttgcgaggcggggcttcggtggaaggggccgggctctgttgcaaggggcagggctattagagaagggaggagctttgttagaagggactggcccgggttatgagctagtaggggcatgctataaaacaggggcagaactgtattgcgggttgggggtgggtagtggatgaaggtgcggggctctaggctagggggcagtgttcgttggtagggtgacacctaggtcgtcggtgtctagggacgcagacggtgtcctgggatgtggcttgttgtataaattggggctgtgtctctgggcttgaatggggtttcatctaaaagcgtgggattctcatggggtagagattcgttaaaggactggagcctggatctcaaggaattgtgaggggcatggctatggaataggaacaaacagctgggcgctgtggctcatgcctgtaatctcagcactttggggagccaaggtgggaggaacacttgagctcaggagtttcagaacagcccgggcaacataatgagacccccgtctctacggtttgtttgtttgtttgtttatttgtttaaattaaccaggcgtggtggcgcaggcctgtagtcccaagtacccaggaggttgaggagagaggatcgcttgagcctgggaggtcgaggctgcagtgagccatgattgcaccactgctctgcagcctgggcgacaaagcgagactctgtttctctctcttttttcttaatttttttattcttttaaatagatacgaggcgtcactatgttgcccaggctgatctagaactcctggactcaagcgatcctccagcctcggcctcccaaagtgctgggattacaggcgtgagccactgcaccgggcagagaccctgtctcaaaaataaataaataacccaagcgctgtggtgagacccgtttctacaaaaaatttttaaaaaatcaaaaagcattagctgggtgtggtggcgggcacctgtagtcccagctgctcaggaggctgaggcaggagaatcgcttgaacccaggaggcagaggctgcagtgagtcaagatcgcgcgactgcactccagcctgggcgacagagtgagactccgtttcaaaaacaacaacaaaagccaaaaaaaaaaaaaaagaaagaaaaaaaagaatagataggaaccaacgctgttggaaggaattgagccataaacaaggggaagagcactggggcagggcggagcttgattgggatgggcgtggttctagctagggacccgaaagggaagcagcgaggggtgtgacgcggagtttttgtttgtttgtttgaaacgaagtctcgctccctcacccaggctggagtgcagtggcgcgatctcggctcaacagcagcctccgcttcccgggttcaaaggattctcctgcctcatcctcccgagtacctaggattgcgggagcgcgctaccaagcccggctaatttttgtatttttagttagaggcagtgtttcgccatgttggtcaggctggtctcgaactcctcgcctcaagtgaaccacccgcctcggcctcccaaagtgctgggattacaggattgagccactacgccggggcggccatgggattagtggcaaaacattggtagagagggatccaatggcagggccagggctgagactatgggctaggagggcggggcttcatgatgggggcgtggttatcaggttcgaagtggggcgcccgtggaaggggcagagccagggacgtgaataaaccttgaagggatgtgattctttaaagggtctggctatgggaagagacagagcttctttagaaggattgagtcctgtgtcttggataaaacgagaggaggacagcctgatcctggacactcagggggcgtggccacgggaggcgggcttctttggaagctgcggggccgagggcgccatactcctgtctgtccagacccccgatcgcccaccgcccctgtcgccctagcccaggcccacgcgcggccgcatgcggatccactcactggagaacgtggacaaggcgctgcagtttctgaaggagcagcgcgtgcacctggagaacgtgggttcgcatgacatcgtggatgggaatcaccggctgacgctggggctggtctggaccatcatcctgcgcttccaggtgaccctcgagtggcccctgccaagccccgcaacatgggacttaggaaagcgttccccaccatttacccattcattctttccttccaataatatcctaatatgctggaatcctattccaggtgttagggatgaaaataatgataaaaataattgtcacgatcaccaccatcacgataatcattttgtatcgaccctgttccaaacactgttctaagcacttgacatttaatacacacagcaaccccataaattaggtactatttagtaccccattttaccagtgaggaaatggaagcccagataggtggtgtcatctgcccaagatcacatatacctgggtgttggagctgaaattcgaatccaggcaatcttgatccagtatagagacaaatagacaaaggtgtgccttttaggagcttacattgtggtgaggaagacagataataaatacataaatatgtaaagaagacatgtatggaaaaaggaccagttctagttagagaagtttaaaaagctatgcagggccaggtgaagtggcctgtaaacccagcactttgcgaggctgagatgggaggaacactaaggccaggagtttgagaccagcctggccaacataatgagaccttaaataaatttaaaaaattagccaggcatggtggtgcatgcctgtggtcccagctactcaggaggctgaggcaggaggatcacttgagcccagcagtgtgaggctgccgtgagctatgatcatgccactgcactccagcctagacaacagtgagaccatgacttaaaagaaaaaaaaagctacccagaaaaatacagattatgataaaacaagtaatagggatataaaatgtcagttggtggtgttgagattttagatatggtggtcagaagagggctgtctgggaagttgatggctgaatgacatacaaagatgaagagagaatgcattccaggcagggggcacagcagatgcaaagtccctgagatagaaatgagcttggcctgttggaaatacaggaggaagagcagagtggctagagaatgggaggcaacgggagacatggaggagctgaggctcaggggatggaaggggctaggtgatctgtgatgagtagtttggattttattctgtctgagatggggagaggttgcaacattttatcaaggggaggtgcatacaagtttagaaagatagatccctttggctgggcatggcggctcatgcccataatcccagcactttgggaggctgaggcaagaggattacctgagtttaggagttcgagcccagcttggccaacatggtgaaaccccgtctctactaaaaatacagaaattaactgggcttcatggtgcacgcctgtaatcccagcgactcaggaggctgaggcaggagaatgtgagccgagaccacaccactgcactccagcctgggtaatagatagagactctgtctcaaaaaaaaaaaaaaaaaaaaaaaaagtgaccgggcttggtggctcatgcctgtaatcccagcactctgagaggctgaggtgggtggatcacctgaggtcaggagttcgagacaagcctgacaaacatggagaaaccctatctctactaaaaataccaaattagctgggcctggtggcacatgcctgtaatcccagctactagggaggccaaggcaggagaatcgcttgaacctgggaggtggaggttgcggtgagctgagatcacaccattgcactccagcctgggcaacaagagtgaaactccatctaaaaaaaacaaaaacaaaacaaaaaaaaaaacaaagaaagatccctctgggttggaggtgttcaccaacattgggagctgagagcccagggaggaggatagagttggaccagggtgggactatggggaagcaacaaggggcaggtggggaagacactcagggagtggagtggacaggccttacgggaggggagagggagagggtgtccaggggaagactcagagctctggcctggggactagaggatgatggggctgccctgagacagggacagggagaaggagcaggtttgaggaacaccctgaggccagtttgagatgggtccagtggttatgggtccaggacattggagttggggatgttccaggtagatggaacagccagtgctaaaggaccaaggagggaggatgcttgtgattcaggaaaaaggccagcaggtatggagtggagtgagctgttgaagatgaggtcatcaacttactgatgggagatcatgggaacttttacttttaccttgaatgaaacagagatacggagggtgttgaaaagaggagcaaggatctgatttgagtgttcgcagggtccctctctctgccatgtggagaacacactgtggatgcaggagtggggagatcagcatgaaggccaccgcactagcctaggcaggagacggcagtgccttagaccaggaaagtggcccagatgctcagtttggaggctttcttggaaacagagaccgaagtcctaactgatcccctaattgtggatgtcctggccctcaggaattatcctcacactcctggacccccacccccagccagaagctgcctcccccatctcctctgtcacctgccaccttctctggtagcagatggtgagtggggggcattcgaagcctcaagctctccaggccctggtagccattttttgtatcttcacagattcaagtcatcaaaattgagactgaggacaacagagagacacgctcagccaaggatgctctgctcttgtggtgtcagatgaagacagctgggtaagcacccccaccaccttccttaggaggttaggcaagtggtcccctaacctctgcaattccttcccagacaagagctcaaggggcagcccatgtcctcagggtcaaaaagttacatctgaaactaaccagctggtaaataaaatatgtccacttctccagccttgactaataatccttcctaacatgctagaaggccaggttcaaatttattttgaacttgctctgtcacccaggctggagtgcagtggcatgcactgaatagctcactgaagccttgatctcctaggttccagtgatcctccctcctcagcctcccaagtagctgggactactgcaccccacccagtttcaaatgtagaactcttggcctcactaggcacagtgtctcatgcctgtcactttgggagaatgaggctaggactttgagatcagcctaggcaacatagcaagaccccatctctacaaaaagttgtggggttttttttgttgttgttgtcgttgttgtttttaatcacaggcatggtggcagacgtctgtagtcgtagcttctcaggttcccaggaggctgagatgggaggatcatttgagtccaggagttcaaggtgcagtgagctacgatcatgccactgcactccagcctgggctacagagcaagaccctgtcttgaaaataaataacaaacacataaataaataaacaaacaaataaataaaaataaaatagaactcttggactcctcagagaccaatgctggaaagaggtgaactgtccccagcctgctctcttctctctctcccccatcccatttcatcctacatttcaagagatctcacattcacctgtgtggaccctcagtgctatgtccaagctctggccaccctctcccgctgtgagcatctcccttctgcctcacagggcatacacaggaaagttcaaagtccttggtcgcttcagtgtggctgagctggtggcggggtggggtgcaggctctactgggaaggttccctttggcccccaactctctgccctgcagggagcagtaagacctgaaactcaattgtcctctgtagagcagctcctgggaggacggagggaggggcaggtgtgggatggaggtgggcttctctgactctcatccttctggctgtctgtcttgcaaaggagatcatggggacttttgccatctgtttctccatgtgtctatctctatatctgcttttccttgtacttatctcttctctcctccctccttccctcctttcctccttcccttttctcttcatgtcttctttctctctcctctcctttccctccccatctctgtctatatcttgctctctccctgtcttgatacctctctccttcctctctctctccttccctctcttctctcttctttcttttgcttctctttttctcttctctcctgctatctatcttctatcaatctatatatctatcatctatcaacctatatctattatgtatgtatgtatctatctatctatcttctatcaatctatatatatatcatctatcaacctatatctattatctgtctatcatctatcaatctatctatcacctatttatcatctatctatgtatctacctatctctctctctactcaccatctatcacctgtctatcatctatctgtgtatctacctatctctctctctacctacccaacacccacccatccatccatctttctatgttctaccccctctctctcatcttccttccctatcattcggtctccctctgtctttttcccctttcttccctcctaactctccccatctctgcctctgtttctcccttcacccttccagttaccctgaggtaaacatccagaatttcaccaccagctggcgggatggcttggccttcaatgccctcattcaccggcacaggtaccacctggcctgggacagcccagtcctgcccttcagccccccatatccctgcagctgcacacctgtacatgtacttgtgtagatggcacacacagacataaagacccatcccttcacctctacacacacatacagttttctttcccttcacacacatgccctgcacatttacacacaggaacacacacccacacaggctcctgtccaggccacataccctgtgcacacatggacacacatgagccctcgcacagatgcatacacacacacagatacccacgcacgtgcacagcctgcccgcagggtaggaagctcgctcccctgtcactgtcatgctgctgtgtacccagcacctcctcctatcagaaaatgctttctcaggccaggcgcagtggctcacacttgtaatccctgcactttgggaggccaaggtgggaggatcacctgatgttaggagttcaagaccagcctggccaacatggcaaaaccccatctctactaaaaataaaaataaaaaattagccaggtgtggtggtgcgcccctgtagtcccagctactggggaggctgaggcaggagaatcgcttgaacccaggaggcggaggttgcaatgagccgagattgtgccactgcactccagcctgggcaacagagtgagactccacccctaacccccccaccaccaccaaaaaaaagaaaagaaaagaaaacacttcctcaaagtgagcccttagagtccccgtccctgtacacccacggattcataccttggggcctgacattgaaatagctgagggtcagacacccacacaaattagacacacatcatgatcattcgcatgacatattggggaaactgagactcaggcgcaggaaggggcttgtggtggtgtagctgaagccagaacccagctttttctgctgtggacacctgtccactcacaatccctgcttctcacacctacacacactcgtacacacatggggagacccagacccacctccatacacagaaactcacaagctgcaccagggtcatcctcacactaggtgacattcgctcagtgttttctatgcacaggcactgttctaagggcttcccactaaaacattcaatagtcaatgtatccattcagtgtgtccgatccacctatgggcaggtgctatttttatttatttatttattttgagggtgagtctcactctgtcccccaggctagagtgcagtggcacgatctcggctcactgcaacctctgcttcccagattcaagtgattctcctgcctcagcgtcctgagtagctaggattacaggcgcccgccaccacacctggataattgttgtatttttagtagagatgaggtttcaccatgttggccaggctggtcttgaactcctgacctcaggtgatccacccacctcggcctcccaagtagctgggattacaggcatgtgccaccacgcccggctaattttgtttgtttagtggagatggggtttcaccatttgggccaggctggtttcaaactcctgacctcaagtgatctgcccaactcagcttcccaaagtgctgggattacagggatgagccaccatgcccggctggcaggtgctattattatccccattttagaggaaaccaaagcacagagaaacgcagtagctcacctagagtgacacaaccaggatatgaccaagctggggctcaagctctgatgaactggctctggtcctcacacttctaaccactgcataacactacataagaatccccaaagtaagcatatgtgtgtcagaggtacatgtgtcctggccagacgcagtggctcacacctgtaatccctgcactttgggaggcctaggcaggcagatcacttgaggtcaggagttcgagaccagcctggccaacatggtgaaaccccgtctctactaaaaatataaaaattagcagggcctggtggtgcacacctgcaatcccagctacttgggaggctgaggcaggagaattgcttgaacctcggaggcggaggttgcagtgagctgggatcgcgcccctgcactccagcctgggtgacagagcgagactccatctcaaaaaaaaaaaaaaaaaaaaaaagaggtacatgtgtcctcacacaacacacataagggctgtacacactcgtattgtcatatgatttcacagagacatacacaggcaggcaccgtgtgggctcatctcttccaagcacactcaggctggcctacccattcgtctgtgtgcacaggccggcccagcaacaaatgcacatgcacacacacattcccgggaacgcacagagacatgcccgcgtccatcacactcacatcacagctaaatgctgcacagcacacacagcttgccccttggctagactgtgcccttctgcccattgccctgggcagtgctcagacaagggtggcttcttccctgcttgcccgccggctctggagcctgcctgctgcctgcctgctctgtgcccctgcccaggcctgatctcgtggacttcagcaaactcaccaagtccaatgccaactacaacctgcagagagccttccgcacagctgagcagcacctggggctggcgcggctgctggatcctgaaggtgagcctctcgcgggcccagcccagacttcgtcttgggggactcccaaccccaatgccatgtcacactcaactccatcccaccccagcaccatcccaaatcctgaggcctctccaaatcccaactctttccaaatcccaactgtctcctcagcctcctccccttgtgcctccccttcctcatgtgcgatccctcccacataccatcctcacacctcttcctctctcatccccaaccgtgtcccaacgtaacccctcctcttccccattctcaatttccacccatccccaacaccctccccaaccctgctttcaaccatctcccactaaaccaactcccactcccctaccccagccccaaacccagtggcatctccaacgccatccccacccctaacgccaaccccatcttcaagtgtctccatccccaccacatcttcggctccaactccattcctatccccaccctaatccatttccaaactcatttcgccctagcccatccccatgtctatctctcccacaactccatcctcatcctcagctgcttttccatttccagtctatccctaatcccatccctgacttcagcctcagccccaaaccaggatcagccctgacacccatctcccatcccaaattaaagctgctcccttcctctgagctctactgtgtgccagacacatgtctgggaaccttatcagagctgttcactttcatcttcacactgacctggttagagagaatttatcaaccctgttttattttattttatttatttatttatttatttatttatttatttatttatttatttttttagatggagtctcactctgtcgcccaggctggagtgcagtggcatgatctcggctcactgcaagctccacctcctgggttcacaccattctcctgcctcagcctcccaagtagcttggactacaggcgcccgccaccacgcccggctaattttttgtatttttagtagagacggggtttcaccgtgttagccaggatggtctcgatctcctgaccttatggtccacctccttggcctcccaaagtgctgggattacaggcatgagccaccatgcccggcctatttatttaatttttgagacggggtctggctctgttgcccaggctggagtgcagtgccatgatctcggctcacagcaacctccacctcacaggctcaagtgattctcccatctcagcctcccaagtagctgggactacaggtgtgcaccatcacacctggctaatttttgtatttttagtagaggtggggtttcatcatgttgcccaggctggtctcaaactcctgacctcaggtgatctgcccactttagcctcctaaagtgctggaattataggtgtgagccaccgtgcctggacgttttatttatttattgttcttatgttcatttatttatttatttgagacagagcctcgctctgtcactcagactggagtgcagtgggggcgatcctagctcactgcaacctccgcctcccgggttcaagtgattctcctgcctcagcttcccaagtaactgggactacaggtgcacgccaccaagcctggctaatttttttttttttttgtatttttagcagagacagggtttcaccattgttggccaggctagtctcaaactcctgacttcaagtgatctgcttgcctcgtcctcccaaagagctgggattacaggcgtgagccatcacacctggcttacttatttatttttttatccaactgaatttaatatttaaaccctgtttaattattattattatgtttgaaatggggtctcactgtgttgcccaggctggagtgcagtggcacaatcttggctcactacagcttcaacctcctgtgctcaagcaatcctctcacctcagcccccagagtagctggggctataggcgtgcacgaccatgctcagctaatttttgatttttttttttttggtagaggtggggtctcgctatgttgcccaggctggtctcaaactactggactcaagcgatcctcccaccttggcctcccagagtgcctgggattacaggcccgagccacatgcctggcttaacctgtcttccaaagtgatgagaatgacagctcagggatgttgtcacttgcccagcatcacactgaaaatcaggaaaccagaccttatggctccagaattcatggtcttaatcagtcctctaccctgcctcttatagctgtatcctgtgctcagtgcctggtacgtagtaggtgctaatggatgtcagttggacaaggcagtgaagaataaaggccaggtatactgttgtgcatccagtgggtaaattaaaatgatatcactcagtcatggtgatggcttgtgcctgtaatcccagcactttgggaggttaaggcaggaggatcgcttgaggccagaagttcaggaccagcctgggcaatgtagtgaaatcccatatctacaaacctgtagtcccagctacacaggaggccaaggcaggaggatcacttgagcccaggagttcgaggctgcagtgagctctgattacaacactgcaccccagatcccaactcaaaaagcaaaaaacaacaaccaattaaagtgatgttagaatttgttgagtttcccctctgtgccaggctagtctttctaatacttacattgttcccaggaggcaggaaccatgataatctttattataacaatggggaaactgaggcttagagaagctaggttattttctaaggacatgcagtgagtaagtgttgaactgggatccaagtgcatgctgcctccaaagcctatgttcttgacatcaagccttgtgcacaatttgcaagctaactaaattttaatttagcacctactgtgtgctgggtaagacagaacagtgataaagaagataggcatacggctgggcccacgcctatagtggcccacgcctatagtcccagcactatgggaagctgaggcaggagtattgtttcagcccaagagttcaagactagcctgggcaacacagagagaccctgtctatgttttataaaaaataaaaagtctatttaaaaaattacaaaaaattagccgggcgtggtggtgtgtgcctgtaatctcagctacttgggaggctgaggcatgagaattgcttgaacctgggaggcagaggttgtggtgggccaagatcacgccattgcactccagcctgggcaatagcttgagactgtctcaaaaaaaaagaaagaaaaagaaaagaaaggaaaggaaaggaaaggaaaagaaaggaaacaggcatagtgtttgtcctcatgaagctcaagctctagataatgacataatcacataagtgaatatgtaattacaaattgtgatacattctgggaaggacatcataagatgctaagaggagaataacatgaggattatcaactatagacagagtgaacatggaggcttgtctaaggaaatttgagttgagccaggcatggtggttcacacctttagttctgactactcaggaggctgaggtgggaggattgcttgaacctaggagctcgaggctgcagtgagctatgattgcaccactgcacaatcagcctggacaagagagccagactccatctcttgaaaaaaaaaaaagtaaaaagttgagctctgaagaataagtgggaattaggaacacagaagaggaacagtgctccagacagtgagaacagcacatgcaaaggccctgaggtggaaggtagaaaggtgtgttcaagaaacaaatataggccaggtgcggtggctcacatctgtaatcccagcactttgggaggccgaggtgggcggatcacctgaggtcagcagttcgagaccagcctgaccaacatggtgaagccctgtctctactgaaaatataaaattagccaggcatggtggtgcatgcccataaccccagctacttgggaggctgagacagaagaatcacttgaacctgggaggtagaggttgcagtgagttgagatcgtgccattgcactccagcctgggcaacaagagcaaaattccatcttaaaaaaaaaaagaaaagaaaaagaaaagtatagcttatttctctgcggtggtttatatgtgtcaggcactatttaattccaggaggtagatttctatttgacggatacaaaacctgaggaacagagaggttaattatcttgcccaaggtcacacagctagtgagagtggcttctccatccctccatccaataccttcaagcactctgtcaaagtgcccactgtcttgtttccccactccctcttgcttccagatgtgaacatggaggctccagatgagaagtccatcatcacctacgtggtctctttctaccactatttctccaagatgaaggctctggctgtggaggggaagcgtatcgggaaggtataaggagccaaggagtgggtgagtgggaagctggaagctggtggcaggcacgggtgggatgaggctgaccccccttcctctgctgtgtcaggtcttggaccaggtattggaggtggggaagatcatagaacgctacgaggagctggcggctgagctgctggcctggatccaccgcaccgtgggcctcatcagcaatcagaaatttgccaactccttaagtggggtgcagcagcaactccaggctttcacggcctattgcacgctggagaagcctgtcaagtgaggcccagctctggagggagggtgggcaggggtggcatgacggcagggctcctgagctcatgccccttcaggttccaggagaaggggaacctagaggtgctgctcttcagcatccagagcaaactgcgtgcctgcaaccgtcgcctctttgtgcctcgggagggctgtggcatctgggatattgacaaggtgaggccggggatgcaggggagaggcggggttgcactgtggagttgtataggttgcacactgctcaagggaatcattcacattgtagacatgatggattagatattcattctgacagtttttcagtagtaaagtgtcataaggaagcaatattttttccaatttgcatgaagttgccataatgctatgagtgacctcagactaagtcaagaccattaaactgtggggagctgtcagagtctgagtgcctcctcccatctcctgcaggcatggggtgagctggagaaggctgagcatgagcgggaggctgccctacgggctgagctgattcggcaggagaagctggaactactggcacagaggtttgaccacaaggtggctatgagggagagctggctgaatgagaaccagcgtctggtctcccaggtacaaggtgtagggcttggctccagggtaaagggacggagggcggggctgatggtcctgggaccagagagggagacttgatcttctaggcaacagggaagagttagattagtctcctggtgataaatgaggatggggatgggagacttggccttccaagtgattgttgggtgaggggaatgggcctgatctccagggtaatgggagagtgaggctggtctccagggtaactagagagggcagaattcatcttttcaggaatgggggagtgttttaagtgacaagggaggttgtatcttgtgtctagggtaactcagaaggatagaattggtttcctaagtaacagagtcaggtaaacctggtccctaatctccaggacaggggaagcatgggcctccttcctgggtaacaagtttaaggttagagatgtaacaggagggtgggacttgtttccagggtaactggagagagtggggctggtctctggggaaacgggaaggtggggttggtctctagggcaacaggggagggtgggtctggtctccagggtaactggggaagattgggctggtctccaggacaacaggggagggtggagctggtctccaggataactgtggaagatgggctggtctccagggcaacaggggatggggggttggtctttagggtaactggggagggtggggctggtctccaaggtaacaatggagggtggggctggtctccaggttacctgggtaacaggggaggatgaggctggtctccaggataactagggagggcagggccagtctccaaggtaatggagtggggagtccccagggtcacacagggtcaaggtaacaggtggactgctgaggcagcatgggtgagtgtctggctcactgccccaggacaactttgggtatgagctgcccgcagtggaggcagccatgaagaaacacgaagcgatcgaggcagacattgcggcctacgaggagcgggtgcagggtgtggcggagctggcccaggcattggcagccgaaggctactacgatatccggcgggtggcagcccagcgtgacagcgtcctgcgccagtgggccctgctaactgggcttgtgggtgcccggcggacacgacttgagcagaaccttgccctgcagaaggtcttccaggagatggtgtacatggtggactggatggaggagatgcaggtgccggcgggggggcggggatgcgggtggagtgccaggagggaggggaggatgcagacgctgaaagagttgtcagacagctggagatggagagggaagggcagagatagaagaagatagagagaaagccagggagacaaaaagagagaacaagagagagagggagagaaagatacagagatggacaagagaggcagacaaagaaacacagaatgagaaagagacagagacaaatagagagaaatagaaacatgctggacacggtggctcacacctgtaataccagcactttgggaggccaaggagggcagatcacttgaggtcagcagtttcagaccagcctggccaacatggtgaaaccccatctctactaaaaatacaaaacaattagccgggcgtagtggcgggcgcctgtagtcccagctacttgggaggctgaggcaggagaatggcgtgaacccgggaggcggagcttgcagggagccgagatcccgccactgcactccagcctgggcgacagagcgagactccgtctcaaaaaaaaaaacaaaaaaaacaaaaaacaattagctgggcgtggtggcgtgtgcctgtagtcctagctatttgggaggctgaggctcaagaattgcttgaatccaggaggcagaggctgcagtaagccaaggtggtgccactgcactccatccagcctgagtgacagagtttgattctgtttcaaaaaaaaagagagaaatgaaaaaagacatagagatatagaaacagagtaaaccagggatgcagacagagagatagtgacagtttgagagagaggaaatcagagagacagagagaggagaaggcagacacaaaggtgacatggaaatctacatgactacagagaaagatacaggaagatggaatcaatttaagagagagagagagagacctaccagatctagagagagatgagacaagaaagatagaagccagctgggcatggtggctctcacctgcggtaccagcactttgggaggccgaggtaggcagattgcttgagccccagagtttgagaccagcctgatcaacatagtgagatcctgtctgtacaaaaaaaaaaaaaaaaaaaattagctaggcgtggtggtgtgcgcttgtagtcccagctactctgaagtgggaggatcgcttgagcccaggaggttgaggctgtgtgagccatgattgcaccactacacttcaacctggatgacagagtgagaccctgtctcaaaaaaaaaaaaaaaaaaaaaagaagaagccgggcacggtggctcacacctgtaatcccagcactttgggaggctgaggcaggcagatcatctgaggtcaggagttcaagaccagcctggccaacatggcgaaaccccatctctactaaaaaatacaaaaattagccgggcgaagtacatctaatcgggaggcaggagaatcacttgaacctgggaggtggagtttgcagtgagctgagatcgcgccactgcactccagcctgggtgacagaggcagactctgtctcaaaaaaagaagaagaaaaaagaatgaaagggaggaaggaaggaaggaaggaaggaaggaaggaaggaaggaaggaaggaaggaagaaagaaaggtgaacaggagacacagacaggaaggtgaacaggagatggagagaaagagaaaagggtagaaatgtagaaagagaggcagagaaagatggagacaaagatgtatagataagaaagacatggaggcagagagtgagccactgtgacagagacagagcccagaaatgtggagtccacgagagatggaaacattcagagagagactggtagagagagagggagacagagacagaacaccatggctagctgtgagagctgacagcagctggggctcagcttttttctttctgatgaggaaaccgaggtccaggccacagagctggtaagagagtcttgaggctggtccatatctctccaagagggtcagagtcgggagtgatggtgcagagtagcaggggctggcataggcaatgggggagaggtgagtggcccagggcagtgccagaggtgtgctcagtgctgtccccgcttgtaggctcagctgctgtcccgggagtgtgggcagcacctggtggaggcagacgacctgttgcagaagcatggactgctggagggagacattgccgcccagagcgagcgggtggaggctctcaatgccgctgccctgcgcttctcccagctgcagggtgagtcttggggctggggctggggctatgggtggagactgtcaggactggtgctaatagaggcaagagtgactcctgagagaaggaaagagtgagctccttgtccttggaggcatttaagcagagcctaagattacattccactggggaagtcatagggagaatcagtgccctgagtggcaggatgggccactcgacctcttcctgctttagattctgcagtaataacccacatttattgagcacttgttatgtgccaagcccttcacagattgatctcaacgaataccatttaaaaagacttgtgtgggctgggcacggtggctcatgcctataattccagcccttttggaggccgaggcaggaggatcacttgagcccaggaattcaagaccagcctggccaacatagaaagacatcatctgtaccaaaataaataaataaataaattagccaggcacggtgatacaagcctgtagtgccagctatttggaggctgaggcaggaggctcacttgaggccaggaattggaggcttcagtgagccatgatcatgccactacactccagcctgggtgacacagtgagatcttgtctcttaaaaaaccaaaaagaaaacttgtgctaagtaatgttaatcagggcctatttaacacaagtgatagaaactcagttcaaatggcttaaggtgaaaaggagtggattggctaatgtaaccaaaatgttcagggaagcctagtcaacatggcgaaaccccgtctctaccaaaaatacaaaaaattaggtaggcatggtggtgcacgcctgtagtcccagccactgcagaggctgaggtgggagaatcacctgagcctgggaagtcgaggctgcagtaagccaagattgtgccactaaactccagcctgggcaactggactgagaccctgtcagcaaaaaaataaaataaaaaaaaaaaaagtctggggaagggtgggttttacctcaggcatggctggatccaggtatggctcaagggtgcttttaggactccatctgagaccaggcatggtgtctcatgcctgtaattccagagctttgggaggcaaagatgtgaggattgcttgaggccaggagttttgggcaacatagtgagaccccatctctatatcaaaaaagaaaaaaaaaagaaaaagactcaggccaggcacggtggctcatgcttgtaatcctaacactttggaaggccgaggcaggcggatcacttgaggtcaggctttggccaacatggtgaaactccgtctcttctaaaaatacaaaaaaattagccggacatagtggtgcacacctgtaatcctagttactcaggaggctgaggtgggaggattgcttgaacccaggaggcagaggttgccatgagccgagatcgcaccactgcacactccagcctaggtgacagagcgagactccttctcaaaacaaaaacaaaagactccatctctctcgtctctctccatcactagtctttgtgttagtgtcactgttgagcagtcctgtcccttgtggtataaatctgggatcattcagccccaggtatacagcctaacaggttagcagagccaatgggacccaggcccctttctcccaagagttctgacaaaaagtcctaggagagcttgcattggctcacagtgggttccatcattgctcagccaatcattgtggccccagggcatgcagtgatctaatcggccacatgcatgtgacctgcctaccccagggccaggagtggggtcagcccattacaaaggcttagactgaaaaagaggagagagggacggccttaccagatatggatgggacatggatgctgataggcaaaaccaagactggctctaataaggttcctgtcttacttatgtcaatgccctccagccagagaccaccaggagtccctctgtggtcaaacgaagttgggtttggtggctctttacacccaccatggggagctgtggggcttctcagcaagaaagtatgatggggggctaggcgcggtggctcacgcctgtaatcccagcactttgagaggccaaggtaggtggatcacatgaggtcaggagttcgagaccagcctggccaacatggtgaaaccccatccctactaaaaatacaaaaaattaatttggtgtggtggcatgagcctgtaatcccagcaacccagaaggctgaggcaggagaatcgcttgaatctgggaggcggaggttgcagtgagcctagatcgtgccactgcacaccagcctgggcaacagagcgagacctcatctcaaagaaatatatatatatatatgactggtggcttattgtaggatttgggcttgtgttaggtgatttggaagatgattcagtgtagtgagttttgctgtggattggatgctgtcagaatatgggggtgactaggtgattgggggtcttaatcattttgatctaggtggtgggaggaagagaaggaggctgttgcattcattggcagctgtcattcatctgagccggcgaggggatgcgtggtcatttttgtggtttgcacagtgaccttgattttgtctgtgctcaggcaagattatggagcgagcttggttttgtcctactccatcgtggtcagagtggccccatctgatatgagcgttctgtgagttttttttattattattgttgttgtttattgctttttttttttttttttttagacacttgatctctctatgttacccaggctggtcttgaactcctgggctcaagcaatcctcccgcttccacctcccagagtgttgggattacagacgtgagccattgtccctggccatttctgtgagattattatttttacttatttatttatttttgagatggagttttgctcttgttgtccaggccagattgcaatggcgcgatctcggctcactgcaacctctgcctcctgggttcaagcgattcttctgcctcagcctcccgagtagctgggattataggcatgcgccaccatgtccggctaattttgtatttttagtagagactgggtttctccatgttggtcaggctggtctcaaactcttgacctcaggtgatctgcccgctttgtcttcccaaagtgctgggattacaggtgtgaggcactgcgcttggcctgtgagattatttatactcctcagaacacgatggctagccctgagtgctgacggcagttggggctgctttatttctttctcactgatgaggaaactgaggcccaggccatggagctgataagagggtcttgaggctggtccgtatctctccattaagatgttctcctcctttatctggagcccacagccctttggaatcttggagcattattcgaaaaggaagaacctgtctggcttgcaggttgatggggaagtttctcaccctagccgacctgggtcacatcctaaatgcaaatgctgaagtttccctccacgccctggtgtggacatcctgaccctggctcagctccctcccatccccatctcacctccaggggaggttgttgggaccctctccttcaccttagctaggtttgtctcaggaagctccctttgccctcgccttgtgaattctcggctcctgtgacaatcagcagctccgagaatacagcagaggggccagtgtggggagtgcgagtgtggggagtgcgttgtcatggggatgggaggcagcgcttcctgatgggtggtccagagtgtgagctcctgatgggccacttcttagctgatcctagggcaatccttcccctctctgaggctcagtctcttaatctggaaaatggggctgataaggacactggcctcataggatggttgtgagaatcaaatgacattgtgtcagagtaagggctgggtacatggaagctgttttttttttgttgttgttgttttgttttctaagacagagtctcactctgttgcccaggctggagtacggtggcactatctcggctcactgcagcatcaacatccctggctcaagtgatcttcccacttcagcctcccgagtagctgagactacaggtgcacgccaccatgcccagctaatttttgtatttttggtagagatggggttttgccgtgttacccaggctggtctcaaactgctgacctcaagtgatctgcctgcttcggcctcccaaagttaggattacaggtgtaagccactgcgcctagcaagaagctgttgttattgtaactattattcagttggataccttgtggtttgagtcaacatcagcgaatgtccagaattacagaaatcccgcattccacatagggcagtgtctcacttttatgatccagtaagaaatacacagccaggcagtggctcacgcctgtaatcccagtactttgggaggccaaggtgggtgaatttcttcagcccagatattggagaccagccagcgagactctatttctacaagaaacttagaaaaaaaattagccaggcatggtgttgtgggcccatagtcccagctactcaggaagctgaggcgggaggattacttgagcccaggagttggaggctgcagtgagccatgatcatgccactgcactccagcctgggtgatagagtgataccctatctctaaaataaataaataaataaataaacacacttacctcatgactcacagttcacatgcatacatgggcacacaggctaacacagaggttttataaaacaatacttccaggctgggcgcggtggctcaggcctgtaatcccagcattttaggaggctgaggggggcggatcatgaggtcaggagttcgagaccagtctggccaacatagcgaaaccccatctctactaaaaatacaaaaaaaaattagctggacatggtggcacgcgcctgtaatcccaactactctggaggctgaggcaggagaatcacatcaacctgggaggtggaggctgcagtgagctgagatcaagccattgcactccagcccaggcgacagtgagagactctgtctcaatcaaacaaacaaacaataccaaacaacaacagcaacaacaacaaaaatactcccccgaccttgttttgcattgtgatattttccgttccttctattctattccaccaaacaaatgctggctgtgacccattaaattaacttcactgttttctagtcgccaactagccatccaggaggaaggtgaactatttaaggaaaaagagggagttcggggttaagcacagtggctcatgcctataatcccaacacttcgggaggccaagtggaaggattgcttgaggccagccgttcaagaccagcctggccaacatagtgagatcctgtctctattttaaaaagaaaaaggagtgcagataaccactgggattgatagataatgcaacagaggatgacagagggaacctagaaacatggtttaagaaaagagaagttggccggtggcagtggctcatgcctgtaatcccagcagtttaggaggccaaggcgggtggatcactggaggtcaggagtttgagaccagcctggccagcatggtgaaaccccgtctctactaaaaatacaaaaatgagccaggcgtggtggcgggcgcctgtaatcctagctactggggaggctgaggcaggagaatcgcttaaacctggaggtggaggttgcagtgaaccgagatcgcgctactgcactccagcctgggcaacagagtaagaatctgtctcaaacacacaaacaaacaaaaaacaaagaagtttcatttgactcagttctgacataagcacaattttcactcaaatatacagaatctgagatgctctgaatccatccatcattcagtcaacaaatcactacattcactaggctacagctctgggctccaccctttgctgggcagtgtttgggatagggtgtgacagacccaggtcctgcccttaaggagctctcagtccagtgggggagacaggacaaggcaatgacaacacagagtagtcagggctaggatggggaagcagagaagcctgagagggtcgaggaggagcctgctccagccttggggtgtcagggaaggctgcctggaggaggagccacgtgacccggcatctgatgaagtcacaccaaggacagggtaggtagcccgcaccatcctctcttgggcgccccttggcttgtgaccaatcctggatgctccccttctcctggctcaggctaccagccctgcgacccgcaggtcatctgcaaccgcgtgaaccacgtgcacggctgcctggcggagctgcaggagcaggcagcgcggcgacgcgcggagctggaggcttcgcggagcctgtgggcgctgctgcaggagctggaggaggccgagagctgggcgcgcgacaaggagcgtctcctggaggctgcgggcggcggcggtgcggcgggcgcagcgggcgcagcgggaacagcgggcggcgcgcatgacctgtccagcacagcgcgcctcctggcccagcacaagatcctgcagggcgagctgggcgggcggcgagcgttgctgcagcaggccctgcggtgtggcgaggagctggttgcggccggcggtgccgtcggcccgggagcagacaccgtgcacctggtaggcctggcggagcgcgcggcgagcgcccggcgccgctggcagaggctggaagaggcggcggcgcggcgagagcggcggctgcaggaggcgcgggcgctgcaccagttcggcgctgacctcgacgggctgctggactggcttcgcgacgcttaccgcctggcagccgccggtgacttcggccacgacgaagcttccagccgccgcctggcgcgccagcaccgcgcgctcaccggggaggtggaggcacatcgcgggcccgtgagcggcctgcggcgccagctggcgacactcgggggtgccagtggcgcagggccactggtggtggcgctgcaggtgcgcgtggtggaagcagagcagttgttcgctgaggtgaccgaagtggcggcgctgaggcgccagtggctgcgggacgcgctcgctgtctaccgcatgtttggcgaggtgcacgcgtgtgagctgtggatcggcgagaaggagcaatggctgctctccatgcgtgtgccggattcactcgacgacgtcgaggtggtgcagcaccggtgagcgcgcacatgtgggactccggggtccccttcctcatgcacccagtctcaccttcattggctcaacagttcccatgtttgctcagctggaactaggagttccaatccctgcttcacccatagccagctttgtgacagttctgcaacctgcctaatcttcctgaacctcagcttgcccacctgtataatgggggtgatattagtccctacccaggcttgtgatgaacggtaaatgagttcatacatgcagaatacgaagcaaatgcctgggggtagaggaagcattcccccagcatttgctcttgttacccaggcttacattcgccaagcatgaaatcaacgacctatgcttctacagggacacctcagcctggcccctctgctgggaggcctcccattgcttctgcataaatgtcacctccctagctactaaaatagctctgactcttgtgattttccattgtttcatcctgttttacatttctttgtagcacttaccatcccatgacatattgtatactgacttgtctgttggctgacttagcaatgagttgttcaattagtgggtgaacaatgcctattccccctctgcaccactctgtctgagcatcttattcatccatacattcattcagcaggtgtttactgagtgcctatgcctttctaggtcttgtgctgggcactgctggaaacacagggctgctccttgcccctactgtgcctgcagttgcccagttctttgaaacattgatttaaagatgggaggaccatgtctagcttaaagtagacctcagtggctgccatgtggagggcaggttggagcgggtaagagttgtggctgggaacccagagaggcaactgggctggggacccagatggagcggaacaagattagaccagggcgggaggtaagtaaacaggccatggagactgatgggctggagcgattttccaaaacaaagcccagggctctggcctggcagatgacagtgctgtccccaacatgggggcccagaggaagaacaaatttgagtcaggtgggtgtgaatagccccaagaaggtatacagtaggctttgaggtcgaagacaggttcaaaaggtaagaggttgaggctggagactgaggtgtgactgtcatgagttcaggggcaaagaccaaggctgtggggctgggtggaatcattgaagaagggtgtgaaggaaaacccagagggctcagggtggagttgctgctgaggaatctcacatttaaacatcaggtagaggctgggcgtggtggctcacgcctgtaatcccagtactttgggaggccaaggcaggtggatcatataagatcaggagttggagaccagcctggctaacatggtgaaatcccgtttctactaaaaatagaaaagttagctgggcgtggtggcgcatgcttgtaatcccagctacatgggaggctgagacatgagaatcgcttgaatccgggaggcagaggttgcagtgagccacaatcgcgccactgcactccagcctgggtgacagagcgagactctgtctcaatacatacatacataaattaattaaattaaattaaataagttaaattaaattaaataaaataagcagcaagtagaagagaaggagcccacaaaggaggctgaaaagaagggtggattgagaattaggagtagaaccagtagaaggtatttcataaaaccaaggtccgcagggttcgggtgtctgagcatctccatcctcctgcagattcgagagcctggaccaagagatgaacagcctgatgggccgcgttctggacgtgaaccacacagtccaggagctggtggaaggaggccaccccagttcagatgaggtgcgttcctgccaggaccacctcaacagcaggtaggagggcctggggctgggagtccctcccatccttcccttccacactcacacagccatggacagcaagatgtgcaatctcaaacccctggaatcataatggccacccgataaatcaacaaaatgttgaccaaaaatcataatccctgatactggtgatgacgtggtaaaattaaaacaacatttcagttggctgttcatttatttgtccagaaagaatgtattggatatctacaatctgccaggagtattcccaagcactttatatacctttctaaagtatcccaacattcttccgggcacagtggctcatactgtaatcccagcacttcaggaggctgagatgggtggatcacttgagctcatgaattcaagaccagcctgggcaacatggtgaaaccccgtctctctctctacgtgcgcgcacacacacacacacacacacacacacaaaatatatatatacacacacatatatatacacacatatatacgtatatatacacatatatacgtatatatacacatatatacgtatatatacacatatatacgtatatatacacacatatacgtatatatacacatatatatgtatatatatatacacactatatatatgtatatatatatacaaaatttagccaagcatggtggtgcacatttgtagtcccagctacatgggaggctgagttgggaggatgccttgagcccaggaggtagagattgcagtgagcagagattgtgccactgcactccagcctgggcaatagagccagaccttgtctcaaaaaaaaaaaaaaaaaaattcccaatatcccaatttccatagtaaagatcctagaattcagaactctctctctctctcttttgagacaggatcttgctctgttgcccaggttggaatacagtggcatgatcatggctcattgcagcctccaacacctaggctcaagcgatcctcccacctctgcctcctgaggaactgggactacaggtgcatatcaccatgcccagctaattaaaaaaaattttttttgtagagacagggtctcactgtgttggccatgctggtcttacaactcctgggctcggctgggcgtggtagctcacacctgtaatcccagcactttgggaggccaaggcaggtggatcacctgaggtcaggagttcgagaccagcctgaccaatatggtgaaaccccatctctactaaaaatacaaaaattatccgggcatggtggcatgtgcctgtagtcctagctactcaggaggctgaggcagaagaattgcttgaacccgggaggcagaggctacagtgagccaagatcacaccactgcactccagcctaggtgacagagcaagaatctataccaaaacagacaaacaaacaaacaaacaaacaaaaacctcctggcctcctcccaccttggccttccaaagagctgggattacagtgtaagctactgctcctagcccagaactctttaagataagtaacaaactaatatcagtacctctggaatactaccagcaattctcccagtgcaggtggggttcatagatgaagatacaagtccaaaaaggtgaactccttatccaagattactcagtctataagtaggagtcaaatacagttctggctgaatcctgagctgtagctgtttatctaatatatccagtcttcctggtaacactatgaggtggaaactaccccacattagagaggagaaaactggatctcagagaggcgaagatggaggcccaaggttacacagcaagttaggggatcaaaccgggctttgaagatggatatgtttgacttcaaagactgtgctctttttttttttttctttcttgagacagggtcttgctctttcgcccagactggagtgcagtggtacgatcatggctcactacagccttcaccgcccccgacccgagctcaagaaatcctcctgcctcagcctcttgagtagtgggactatggatgcacaccactgcacccggctaatttttgtattttttgtacagatggggtctcactctgttgcccagactggtctcgaactcctgggctcaagtgatcttctgccttggcctccgcaagtgctggaattacaggcatgagccactctgccccacccaaagactacgctcttgactctgtgctgcaagattccaatatccagggattttaaaacctctgtagccaagaccatcgcaaagcatccaggcctaaaaaaataactacaatcataacgatttacagcatgtagagagatctatatgccaagtgctttagccacatgatctcgttacacactcaatgaagtggactttattatccccattttccagatgaggaaactgaagatcagagaaggaaatgatttgcccaaggtcacatggcaaatctggccagagcagaacttgaactcgggtctgcctgatttcagagtcctaatctctgtcctcatggtgtgtccattctagagggggcagaaagacagttaaatacactaataaatggacaagatatttagagaatcataatggctttatgcaagaaacaggcagggcatggtggctcacgcctgtaatcctagcattttgggaggccgaggcaagcagatcacttgaggtcaggagtttgagaccagcctggccaatgtgatgaaaccccatctctattaaaaatataaaaactagccgggtgtggtggtgcacgcctgtaatcccagctacttgggaggctgaggcaggagaatcccatgaacctgggaggcggaggttgcagtgagctgagatcgtgccactgcactccagcctgggcaacagagcaagactctgtctaaaaaagaaaacaaaatttaaaaaacccaaactattgaggaccccaagagcttgttttagtgggtcatatctattgctatttactatattagaacttagtactgagaaaatttaaaatgtttttatttttatttatttattttgagacagggtctcattactctgtcacccaggctggagtgcagtggcacaatcatggctcactgcagcctcgacttcgcaggctccagcaatcctcccatctcagcctcccaagtagctgggaccataggtgtgcacccccacgcccagctaatttttgtattttaggagtctcaccatgttgcccaggctgctctccaactcctgagctcaagcgatccacctgcttccgtcttccaaagtgctgggattacaggtgtgaaccactgcacccggctgagaaatttgaaaacattatttaaaaataacaatacactgggagtggtgcgtgcctgttagacctgtgaggctgaggtgggaggaccgcttgagcctgcgaattggaggcttcagtgtgccataaacgagttcatgaatagccactgcgttctagcctgggcaacatagtgagatctcacgtcttaaaaaaatttttttaaatctaaatatctaacgtgttaatataacttttttattaaaaataacttttcataacacaaaatgtactaagagtggcattgtttcgtacctttgcaaatctctttaaagtctggtttaagagatggcagctgggcttctcttaaatcagagtcggcttctgctctcagtctctcctgccgcctctggaaaactccactgaacactcgggaaagaatgagagtgaaaaagcaaatggcgtcttaacacatttttatgaagatagttttgtcctctatcagattacatgttgagaatggctgccctaagcaaaagtgctgcgtagggttccattttacaccggcagaaactggagaaactttctgaggtcacacagtggctgggtggcttgggcctggattctaccctgggtcggcgggccctccgcgcccaagaggagtccctgtcctcctcaagtcactctctttcccctgggcaggtggaaccgcatcgtggagctagtggaacagcgcaaagaggaaatgagcgcggtgctgctggtggagaaccacgtgctggaggtggccgaggtgcgcgcccaggtgcgtgagaagcggagagctgtggagagcgcgccccgggccggcggcgccctgcagtggcgtcttagcggcctagaggccgctctgcaggcgctggagccgcgccaggcggcccttctggaggaggcagccctgctggctgagcgcttcccggcgcaggcggcgcggctgcaccagggcgcggaggagctgggcgccgagtggggcgcgctagctagcgcggctcaggcctgcggcgaggcggtggcggcagcagggcgcctgcagcgcttcctacatgacctcgacgctttcctggactggctcgtgcgcgcccaggaggcggcgggcggcagcgaggggcccctgcccaacagcctagaagaggcggacgcgctgctggcgcgccacgctgcgctcaaggaggaggtggaccagcgcgaggaagactatgctcgcatcgtggcggccagcgaggcgctgctggccgccgacggcgcagagctgggcccgggcctggcactagacgagtggctgccacacctcgaacttggctggcataaactgctcggcttgtgggaggcgcgcagggaggcgctggtccaggcgcacatctaccagctcttcctgcgggatctacgccaggcgctcgtggtgctgcgtaaccaggtgcccactcggggtgtacatttcggagagggagagtccgaggccgcggggggattgcagggacagggacatgcgggggtggggaggagggtgtttcctgggaccactgggttctgaggtgggtgggaggtgagagagtatccggaatggataactgagtttgtggaacatccagtgtgtgtggaagtgtgtatgtaacagaatttgaggagtatcatcagtggggtaggttggtgtcttatcggaggtgacagtttgtgggctatcccgagtaagtaatgcacgaggatatttattggagtggcttcctgggttcgtggattatctgaaaggaaataagactatgaggttgattggcgatggttaaatggggttcaaagaagatcttggtatggataacaaaggattaggattatggaggtaggtaacaggctgaggggttattggagtcagtcagtgattgtggattacatggtgtggatggctaaattagcacaatatcttcatttctgggaatgacaactatggattctctggagagagtaactgtgtctgtggcatgaggaaccaagtgcagtggttatctggggacagccaatccagttgggagatcactctgggatgggaaccaagtttgagaattttggcaagatggaacagccagttttcagattgtccagtgtttggggatcatgttagaaagggtgcctgcctgtactggttatataagggatgctgacccagtttgaggattatctacagcagtggtccccaatcttttttttttttctttagatagagtcttgctctgtagctaggctggagggcagtggcgtgatctcagctcactgaaacctcagcctcccgggttcaaacgattctcctgcctcagcctcccaagtagctgggactacaggcgcgagccaccatgaccagctaatttttgtatttttagtagagatggggtttcaccatgttggccaggatggttttgatctcttgacctcatgatccgcctgcctcggcctcccaaagtgttgggattacagacatgagccactgcaccaggcccagtccctaatctttttggcaccaaggactggttttctggaagacaattttttccacaaaccggtgggaaaaggaggaatgttttcaggatgattcaagcgaattacatttattgtgtgctttatttctattgttattacattataacatataatgaaataattataaaactcactataatgtagaatcagtgggagtcctgagcttgttttcctgcaactagacgttcccatctagtgacatctaggggtgatgggaggcagcgacagatcatcgggcattagattctcataaggagtgtgcaacctggatcccccacatgcgcagttcacaatagggtttgtgttcctatgagaatgtaaagctgctgctgatctgacaggaggcagagctcaggcagtaatgctcactcgccccccctccacctcctgctatgcggcccagtttttaacaggcgatggactagtacccctctgtggcccagggcttgggaaatcctgatctagggagtggaggagaaaggacagagagcccctgaatcataagattactaaatatggagctgaagtggccttgagagaccctttctgacccacccatttaaaaaatagagacaggatcttgctatgctgcccaggctggtctccagctcctgggctcaaacagtccccctgctttggcctcccaaagtgctgggattgcaggtgtgagccaccatgcccggccctgacccactcattttactagttagaaaactaaccccagagggaaaagaacttccttgagttcacacagtacccagtttagttgtcttctttttttgagacaggacctcactctgtcacccgggccagagtacagtggcacgatcatgactcactgcagccttgatctatggggctcaagcaatcctcccacgtcagccctccaagtagctgggactacaggcacgtgccaccatgcctggttaattttttgtatttttagtagagatgggatttcaccatgttgcccaggctggtcttgaactcctggggtcaagtgatcctcccgcctctgcctcccaaagtgctgggattataggcatgagccaccgtgcccagccttcagtcttcatagtaaccaattttttttttttttttttttgagatggggtcttgctctgtcacccaggctggagtgcagtggcgtgatcttggctcactgcacctcctccgccttctgggttcaagcgattctcctgcctcagcctcctgagtagctgggataacaggtgtgtgccactacacccggctaatatttgtatttgtagtagagatgaggttcaccatgttggccaggctggtctcgaactcctgacctcaggtgatccacccacctcggcctcccaaagtgctgggattacaggcatgagccaccatgtccggcctaatattaaccaaatatttactgagtgcctcctctgtgctgggcgctattttggggctgagcacacctcaggcaacaaaatacaaaatcctgccctcatgtggttgacattctagtatgtaggggaggagagagtaaacaagtcaatgcatcgctaatattgccaggtacatgctatgagaaataatacaggagggttggctgggtgtggtggctcacgcctgtaatcccagcacttcgggagtccaaggcaggtggattacctgcggtcaggagtttgagaccagcctggccaacatggtgaaaccccgtctctaccaaaaatacaaaaaaattagccgggcatggtggtatgcacctgtaatcccagatacttgggaggctgaggcgggagaatcacttgaacccaggaggtggaggttgcagtgagccgggattgcaccactgcatccagcctgggcaacagagtgagactccatctgctccctccctgccaaaaagaaataatacaggagggtagtgggatagggctggggtgggagttgataaatttggcaggttggtcagagacctgaagaaagtgaaggagccagccatgggggtatctggagggacagactcccaggcagaagcaccagcatgggcaacagccccgaggtgggaccacaactggaatgttctatgcttgcaaggttgcggggagtggtggcaagccaggctggcagcctctcccaggtcctggaatggaatgaggctgacctttgcaccacgctccctcctccccaggagatggcgctgtctggtgcggagctcccgggcacagtggaatcggtggaggaggccttgaaacagcaccgtgactttctcaccaccatggagctgagccagcaaaagatgcaggtggccgtgcaggctgcagagggcctgctgaggcagggcaacatctacggggagcaggctcaggaggctgtgacccggctgctggagaagtaggtcccctagacccatccaccccagggagggggcagaagatggggcccagcataggggagtggtgtgggaggccagggtcccactcctttcatcacgatttctgcttctctggggctctttcctatttctatttaattccatgttgtcttagatttgatttaagtggatttttttttttgagacggggtctcactgtgttgcccaggctggagtgcagtagcacgatctcggctcactgcaaccctcacctcccaggttcaagtgattctcctgcctcagcctcccgagtagctggggctacaggcatgagccaccacgctggctaatttttgtatttttagtagagacacggtttcaccatgttggccagactggtcttgaactcttgaccacccaccttggcctcccaaagtgctgtgattagcggcatgagccactgcacctggccttaagtggatatattgtgaaaaggtaacctgaggctgtcaacccaaaagatacagaaggatatacaatgaaaggtttctttcttaagtctgccctgagcatgggatagctggtcctgttgttaaaatgttaggctgggtgcagtgactcatgcctgtaatcccagcacttcggtaggctgagacgggaggattgcttgtgctgaagagttccagaccagcctgggcaacatagtgagaccccttctctaaaattaaaaaaaaaaaaaaagctgggcgtggtgatgcgtgcctgtagtcccagctactcttgaggctgagatgggaggactgtttgagtccgggagattgaggcagcaatgaactgtgatcatatcactgcagtccagcctggatgacacagcaacattctgtcccccctccaaaaaaaaaatgtgttaacttacttccctagatgcctcattatccatcctgctcttctgcaccctccttgggaacccccagacctccccagatccagcagctagaggccaggcacaggtgtgttccagctttccagatgggacagtgtcccctgccaggctggttgtcaaatattttgcataagcacctcttcctggccccagccactctaggaagcatgcaaagtgagtgtctgcatgtctctgtgtctctctcatctcttgaacctcattgttctctgcttctgtcgccatctgtctcttgccaccactctcttgtctgtccttgcactaatcaagcgaagatatttattgagcatctactgtgtgccaggcactattgtaggtaggcactgaacaaaacaacaccaccacctccagccatcatgggaagtcctttctcatcttccagacccagttctgtctgtcattagagctgtttctgctcctcctggtgaccctaaatttctcctctcaggctctctggctctctccggcatgatccaggccagaaggggacccagtacccctccttctgtcttcccatctcctgacagaaagcatccctggtcacttcactgtgccacccccagccccaggaccgctaccccttttctgtttacggctcagacatcctttccctagatttatctggggcaaggcagcatgcttctaaaggaaacttttatgggaattctgttcttgaggatgcaaactcatcatttagtgcccccttttccatccaggcctggatccttcctttgttccactttttttttttttttttttgagacagggatcttactctgttgcccaggctggagtgcagtggtgcaatcatagctcactgcagcctggaactcctgggctcaaccaactctcctgcctcagcctcctgagtagctggactataggtgtgagccactgagcatggcctgttccacatttcttgagcacctgctgcatgccaggctcagcaaaacgaggaggaggagcccgggggactgttcattccatgattcattcattcattacttttcagtcattcattaattgctcctttcactctattgtttattcactcatcctccagtcaattaaacatgtactgagcccgtgctctgtacggagtgggggtgtgttcacagaaatgaccaggacagaacatgattcctgcctcacagagctcgaacgttatctgacaaggatggcccagaatgctcggggctgggatggaggaagtccaggcagaaaggtcagggcccggatgggagacgtgcagccgctgtgggagaggcagcatttgtcccaggcttgtggtgggtgaggtgtggtcacagagggattgagacggactaatctctgcaccttcccaccatcccagtcatttatttgtctagggacacatttcccaccctgtgggaggagtgggaggagtgggaggagtttccacatccgccaagggggcagagccatacagagctggggactggggccctggggccctgggggtcttagacctggcttcacccctgaatccgtgacattcagggcaagtcacttagagcttcagcttgcctggcccctcacctggaacctgtgtgtgaggtgctgttctttttttttttttttttttttttgagatggagtctcactctgtcacccaggcaggagtgtagtggcgcgatctcgcctcactgcaacctctgcctccagggttcaagctattctcctgcttcagcctcctgagtactgggatcacaggaaagagccaccatgtccaactaatttttgtatttttggtagagacagggttttgccatgttggccaggctggtctcaaactcctgacttcaagtgatccacctgcctcggctccccaaagtgctgggattacaggcgtgagccaccgcgccggccgctaggtgctgttcttatctgcgttttgcatgtgaggctcagaggggaaaactgacttgcccagagtcatggccaggaagtgccacagcctagatttgaaccctgttgctttcttttcttttcttttttttaaagacagggtcttgctttgttgcccaggctggagtgcagtggtgcgatcactgctcactgcagcctcaatctcctgggctcaaacaatcctcctgcctcagccttctgagtagctgggactaaaagcatgtgccaccttgctcggctaatttttcattctttttttgtagagatgaagtctcactatattgcccagggtggtttcaaactcctgggctcaagcaatcctcctactttggcctccccaaagtgctcggattacaggcgtgagccatcgtgcccggcctactctgttgttctttcaccctcatggagactcagggtcttcctcatctctaggactgatgcttgacagtttggctgctgaaggcctggaaagattgatttcagctcaatttcagaggcattttatctttcctggctcctaagctaagttgggcaggaggcagtcagtgcttcgcttgcttgtctcaggcccttcctgttccttctctctggttctgtctctgcaactgtctcctatacactctgtctctttgcttccatctatccatctatttctgtatctctgtttcctgctccctctctgtttttctctccgtttttctctccctccatctgcacctctctaaccctgtcttttctgcctctgtctttcacagatactgtacttttgtttctcccatcttttttctctctgccactgtgtttcttgcattcattcatttaacaaatataagtcgagcgtgtactgtatgccaagccctttttctaagcattggggacacatctatgaacaaaacagacaaaaatccctgccctcatggaaatgatatatcctagcatgggagacagccaagataaataagtaacatatagcacgtgttagattgcgttaagtgctaaggagaaaattaaagaagggaagaaagccagaaagtgttggggagtggtcaggagggacctcacgaagaaggtgatctttgagtagatgttgggggaaggagcattcccagcagagggaacggctagtgccaagggcctgaggcttgctcaaggcacagcgagaagggcagtacagttaccacagagtgagggggaagagtgcaaggagaataagagtttggaaaggtgggggtgtggggcctggtaggtcagaaaggcctctgagattggccgagtgcaggagctcactcccatcccagcactttgggaggccaaggcgggtggatcacttgaggtcaggagttcgagaccagcctggccaacatggcgaaaactcgtctctactaaaaatacaaaaattagccaggcctggtggtgggcgcctgtaatcccagctagttgggaggctgaggccggagaatcgcttgaacctggggggtggaggttgtagtgagccgagatcacgccactgcactccagcctgggcgatggagcgagactccatctcaaaaaaaaaaaaaaaaaaaaaggactctaaggactctcatggagaccctgggaggatctctaaggactctcatggagaccctgggaggatagtctcattctctctctctccctgggggagacagatagcaacaggacagggatgcatgggagcccatgtgggatgccccagccccatccaccaggcctcttgggcactttgccttgcactgtgggcaggaggccagactgcccggggcccatggtcccagccggctccagagtggtacggcctgggtccagcctggtcagttcagtcaggccaagggcctcgctctgcctgcaggagtgcccacttcagcttctctgcgactctgctgtcatctctccccacactctgctctcttccctctctccaactctgcggccccctggtctgtctgtcgtctgtggggctgtcttttcctggtggcatttgccactcctctgcctgtctctctctgggctgtccctgaccggactcctcctgtcactttccctctctctgcctcctctctttcgtcgtctgctgctccctgagtttctttctggctctgccttgctccatctcttttctcgtctttttttattctctctctcgctctctttctggtgtctcctctcactttctcgtttgttttgttttgtttttgtccctaggtatgtctgtctttacttctctgttatctttctctctggacttgcctttttttctctccgtctatatctctttctttctaagtgcctgtctctgcctctccctttctcttcctctgtctgtctctctctctgcccttcttcagccccgtccctgcgtccctggctttgccccactaattcctccctctctcttacatattttccacgcccttcttcccctacccagcccagtgccctcacagtcctactgccagcgccgcaccccccaacccggggcctttccccagcccttatctccccatccccaggaaccaagaaaaccagttacgggcccagcaatggatgcaaaagctacatgaccaacttgagctgcagcacttcctccgagactgccacgaggtaggaactccaggtgtgctggggacggagacatcccctttagtcgggagggaagtgcttctcggccgaggtgggggtggggacgccccgtctaagtgggtcgcggagcgatgctcgctctaagccgccagggggcgcgcggagccgggtctcagtgcgcatgctccgcaagtccctgcccgcccacgccgactccgggaaacgaaggaggggccccgggcgcccctggcaaccgcgcgtgtccgcgcctacgggtcccgcggggacgcgcgctgatctcacctttctctcctgagatttgtgagaatcgctctaccccaggagaggggcggggcgggcggtggggataagggccgagggccgtgggggggccagcggccctgcgccctcctgcagccagcgatggctctgaaccaagccctcgcccctttaaaggtgttcagtaatcaagccccttcccttagggatgatctgcacacattagggacgatctcccctaatccgagatggtccaggcccccttccttattagtgacggttcaggagacctgctgtcttcccctccttcccttgcattccatagaaacgattctagactttggccacattagagatggcctagtaaacattttcctaaaccctaaacagagctaggcctggccctgagcccctccatctgtgtgacccaggatcatcccctcctccatcatcaccccgtacctaagtttcttccaaccaaagctggttcaggaaccaggtctaacccctaaacccctcagcctcaattaaagacgattcgaccctcccccctatgttgaacacccatgggagattgttctctccgcacacggaataaacaagggcctccataccgtgcccccctcccccataactggggtaggccgggacttgagccactggaggaaccccctgttccccctcgcccccactggagattgtgagatgttccaggtcgccctcccatatcccctgtccacatgtggtggccaggagcccgagcttcttcccattagagatggttcaggaggcccccacccagcccctcaccataatccccactcccttagtgaggcagtccaagccccaggcgctccctcccggcattagatttggtccaggagcaccccccatccctcatgagattgttctggatcaggcagcaatcatctgagatggcgcagaagccccccacccgaagccttggggcgagtggtggttcctcctgcacccccacctggggccccgcaaagaggcgggcagggaggcaggcagggggcgcacgcgggcgggcgcgcggccgccgcgcgggggcgagggagggggcgcgcggccgccggagcctcagccttcgccgccgctgccgctgccgtcgcagttgaggggcgagcacccgcccgcccgctgcagggacgccccgccaacgccactgccgcttcaggtctcgggggcgcccaggggagggggttggcgcgcaccccgcggacgcagacaggggagggggctcgggcgcgtgcccgcccgtcgtggccgcgggagggaggggcggggcggcgcgggggcgggccgggcaggcgcccggacccccaccctgggggaggggcaaggacgccgggagctgtccgcggtgctggcgcgggcgggactgaggggccggcccccaagggaggggagcgaagcggggggacttctaagaccacttctagggtaatctggatttgccctaagggttcagggcgtctcagcctttcgagggggggctcttctccgggtaatggggcatctaagatttgccctggggttgggggtttctcaaccttttggggggtttctttcttgttttgggaggatctgtatcagccttggatgatggaggtgaatcacttttggggggctctgccttggaagatgaggggccttggattttctctgggtctagggggctctgactttgtggggcttttcctgggttgttggatagtctggttttgccctccatcatgaaggaatcacttttgagggggctttactttgaggatggggtaccatctctttaagggctctgctttcactgcgggctgtggttgccgttggactcttccctgcacgtcgggaacctgtgaattgagttggggggttcagcactggacttggttctagtgtgtgtatgaaggagtgtgatgctgtcctggacccctggggagcacatgctcaggggacatgggctggggtttggccggctggggatctgggatttgtccttggctatgactgcatttgcctcccgggaccgcggagctggagtccagtgtttgtttttttttttttttttttttttttttttttttttgcaggagggaggagggaggatcttgtgactggagtggggaggagaaaggggaggagcaaactgtttcaggtgccaggtttggtcatgagtggggaagttctggcttggaggataagtctggttttttactggagggggttgggggaggctcaaaaagcagcctgtgattgatcctctctagtgccgtgagaggggcccactcttggtgcttgcgttttggatgactggttttgttggtgggtaggaggactagaactggctttagttgtaggggtgggggtgctggccgggcttgggaggtccgatctgatccacgatggagagtctgtggctagattttggggtagactggtttggagagccagaacacagctttgtttttcacatttggctggggttggctttggttgagggctagaactggtcatggtttggggatctatggtcttagagtcccagggctagaactggggagccctgtgggctcattaggggtgctagatctcgattatggaggatgggtctactccagattagagggttagtttagagagagctagagttggctttaattgggaggttgtttggggggtttatctggccatactggaggaactggggctagatatgggggcttcatttgatacccttgggaatgggttgaggctcttgaattggtccttattggggggtggctaagattgaatgaagtgtctaagtgttgctatgggaggggtggtcctggggatgaattgggagttagctaaattgggttggagagcttgttttggggggggtgatctgtccccaagtctaagaggctgactggccctgccttgggggcttgtggggagttgaggagggcttccctcaggacaggggacaggggagcaaaggattgggcattctggggacccttccatccatcctctatccaggaaagagcttgagctgcacccacccccaatataaaggcctcacttgcaaaggttttttcatcctttcctattccttccacccatacaccctagcagcccaggccctgaacctgggacttcctgaagggatggggggctgtggcaggttgaggggaccagctgagccctcctgccctgttctgcacagctggatggctggatccatgagaagatgctgatggcgcgggatggcacgcgggaggacaaccacaagctgcataagagatggctccggcaccaggcattcatggccgagctggctcagaataaggagtggctggagaagatcgagcgggtgaggaagctgatggcccctctgcctgtgccaggtgcaggaggcctccagggagcccacgtctcacctgctgcacccgctgctgccatcctgctggtcttacacctctggactgactcaaatcagctccagatctgctcctagctatgtggctttgagtgattcatgtaacatctttgagcctcaatttgctcatctgtaaagtggccagcatctcttctgaatggtgcctgtatcctactgtttgttaaatatttcacttcttaatataacctcctctaccaggttccttccataccatttggggcatttaagatggaaggttggggagatgggctgggacagaccctgggaagcccagggttaaagtaaactttggattcttagagccctgggttctaactgtgtctatgcctgttaccagctgtggggccttaggtaattgtgttaacctcttggagcctcagtttgctgttctataaaattaaggaaataataaatatagctacttcctgggctctgtgcacataaagtacttaacacaaggccacgcacctaagagctgtaattactgtggtcttgttacttttaatacttaatgttacctaagtagctctgggccactaagaaccttgacttcagtcttggagggactgaggtagatatttgctctaagcctcaaccctcagaacttccccctcctctggctgaacccctagacctgtagccctggatatacacacttttctgactcacacagagacacccatgttggccttaaacccttaaatggtcattgatgtttcataaatggtggcatatggcgaaggcagtcttcttgactttgagtttaatggaagttcattctctccctgcctctctggctccctctatctttctttcctgtctgtctatccctctatccttgtctttcttacggtcctctccccatgtttctgattttctgtgcctgtctctctgttgatcactctgtgactgtttgtctctccctgactccttcccatgtctctgtgtccatctgtctctccctgtatctttctgtctccctcccctcacttctgtctgtctgtctctctcttcttgtctctcttccttggttccttccatttctgggcctatctctgcatccacccctcatgtctctctctccctatgtgtctcccactccctgcctctgattctcttttcacatccttccctgtgtcctgtcactctcccacacttctctgattctccccaccatctatctatcttctccatctcctgccatccacccacttggggcaggagggccagcaactgatgcaggagaagcccgaactggcggcctccgtgcggaagaagctgggcgagatccgccagtgctgggcggagctggagagcaccacccaggccaaggcacggcagctctttgaggccagcaaagcagaccagctggtgcagagctttgctgagctggacaagaagctccttcacatggagagccagctgcaagacgtggaccctggaggagacctggccactgtcaacagtcagctcaagaagctgcaggtatggtcttcctggcccagatgagggctccctatgccacatgggggccaggtcagggtccaaccccactcaaggtatgtcaagtggaggggatttaatacagggatttatttcaaacttgtagaagatgagaaagggaatattgaagcaatccagctagtaataactgttggaagcagccaccactccctaaggtatggagtacaaagggaaaaggaaggatctagagccacaaagcagtaggtaaatgactagcatgctaaaggtttcacaggaccctgacactcatttcctggatggagaaaccaaggctcaggggtatgggaatggctttgcatggaataacaatgacattcattgagcatttctctaccagtctctgggccaagcactcactgaactcatcccagccacttctggagattggtactgttattatcctgttttaccaatggggaaactgaggcacagaaagtaaggcacctggcccaaggacacacagctaaccagtgtctcctttatgaaacagggcactcttagagaacagacgcagcgtctgctttgtatctgctcccagcttggcagctccatgcttggtacacagcagttcacgtggaatgaccagaggtgaacgtagccattgcttctcacctcccagggagtaatggctcctgcctttgattttctttttttgttgctgttgttgatgttgttgtttgtttttttcttcaagatagttactcactctgtcgcccaagctggagtacagtggcttgatctcagtccattgcagcctcaaactcttgggctcaagtgattctcccacttcagccttccaagtagctgagaccacaagcgcataccaccacgtctggataatctttttaaattttttatagagacagggtctcaccatattgcctagggtagtctcaaactcttgggctcaagcaaccctcccgcctcagccttccaaagtgcttggattacaggtgtgagccatggtatctggcccacgtgactcctgcttttacctgtcaggaacaatgcctgactgactgatgggaaactgaggttccaggaggtgagaggtgaacttacttgtccagagtagcaaatagcaaagcctggatttcagtccagtgcccttgactcttcactcctcctttttgatatatttcctatgtagttatatagtgcttggcatagtgtatggcaaaaaaaaaaaaaaaggctagtaagaaatacataatgacactgattagtatgtattcattcatctctgtggcaaataattattaggtaccagctgggtgtggtggctcacgcctgtaaccccagcacttcgggaggccgaggcgggcggatcacgaggtcaacagttcgagaccagcctgaccaatgtggtcaaacctcatctctactaaaaacacacacaaaaaaattagctgggcatggtggtgcacgcctgtaatcctagctactcaggaggctgtaatcccagctactcaggaggctgaggcaggagaatcacttgaacggggaggcagaggttgcagtgagctgagattgcatcattgcactccagcctgggagacagagcgagactccatctcaaaaaataaaaaaataaaaaaaataattaggtacctactatgtgcccggcacttttctgggtgttgggatatagcagtgggcaaaatggatgaaaagttactgccttcacggtgatcccattctggttgggggaacaagcaaaagaacaaaaagacaaacagatctgaatgtgatggccaatggggtcagttcgttctttttccctccgctcccctccccttcccctctcttttcttttcccctcccttccttccttccttccttgcttccttcgttggagtcttgctctgtcacccaggctggagtgtggtggtgcaatgtctgctcactgcaacctctacctcccaggttcaagcagttctcctgcctcagcctcctgagtagctgggattacaggcatgtgccaccacacccagctaatttttttatttttagtagagatggggtttcaccatgttggccaggctggtctcgaactcctgaccacaggtgattcacccgccttggcctcccaaagtactaggattacaggtgtgagccactgtgcccggccaatgaggtcactacttaatatagaatagcagttctcaaatgtctgggtctccaggaccccccttacactcttaaaccgcattgagatccttagaaagctttgtctgtgtgggttagacctattgacattcactgtattaaaaatgaaaatcgaggccaggcataatggctcatgcctgtatcccagcactttgggaggccgaggcaggaggattgcttgagcctaggagtttgagactagcctgggtaacggagcaacagcctgtctctattttattttatttagttatttgagccaggatctcgctctgttagcaggctggactgcagtggtgcaatcacggctcactgcagcctcaacctctggggctcaagtgatgctcctccctcagtcccgcaagtagctgggactacggacccacaccaccatgcctgattgattttttttttaagaaacagaatctcactatgttggccagtctttatctctatttattgaactaaaaaaaaaaactaaaacggagtctggctctgccacctaggctggagtgcagtggcttgatctcagctcactgcagcctctgcctcctgggttcaagcagttctcctgcctcagtctctggagtagctgggattacaggcctgtgccaccaagcctggctaatttttgtatttttagtagagatggggtttcagcatgttgcccaggctggtctcgaactcgtggcctcaggtgatcggcctgccttggcctcccaaagtgctgggattacaggcatgagccatggcatccagactgtagttctctttcatgtctagaatagaagagagctagcttctcccatccgtgtctgtattcaatccatttcactagcacaggtcatcaggtctctgaaaaacactgctgcatgctggagagagaatgagaatggtgaaggcaaataacatcttagtatttttataaaaatagttgtaaccttgcagatgccttgaaaagatctcagggatcccccaggggttccttggccacagtttgagaactgctgatgtacacaatgtgctgggcactgttaactcctctctcctccccaacagccccatgagggaggtcctgttattatccccacccagcagaaaaccacagcacagaaaggatctgtggctcacagaggtcacatggctaccaagtggctattcaataccacctttagtccctccctgagcctctgtcctccctcttaaataggactctatcatcagtgcaggtctcccagggccaggtggggatgtgcacagaaaggagccacttagcacagtgcccaggatgtggtaagcctgcaagaaaggggcatctgactgtcagggtcccagccagaaacagaagcaggctcacctgcagaaaacttgagtttcttgacaaaggtgtgagtggagaacggggaagctgcaggaagcatatagggctgtgggactcatggaggggagcttttgctcctccctagccagagaaggtagagaaggaaaagttattggaacttggaaggggagagttgccagacaggagctggcactcttagtcaagaacggcagccatggccagacgcagtggctcacgcctgtaatcccagcactttgggaggccaaggcgggtggttcacttgagatcaggaattcaagaccaacctgggcaacatggcaaaaccccgtctctactaaaaatacaaaaattagccgaacgtggtggcacatgcctgtaatcccagctactcgggaggctggggcatgagaatcgcttgaacttgagaggcggaggttgcagtgaggcaagattgcacctcactgcactccagcctgggtgacagagtgagactctgtctcaaaaaaaaaaaaaaagagaaagaaagaaagaacggcagccagaccatggcaccatagcagggaagagctggggagataataccccagactcactttcctctgggcttccctttgtcagccagggctggcttcatgggtgtttgcccgtgcagtgacacagggctccatgcttggtttaatgccctactattgatgtcttgaatttttttgtttttgaggcagtttctacctctgtcacccaggctgaagtgcaatggcgtgatcatggctcactgcagccttgaactcctggactcaagtgaacctgtcacctcagcctcctgagtagctgggactacaagcgtgtgccaccacgcccagataatttttgtagtattttatagagacgggggcctcactgtgttgcccaggctggtctcaaactcctggcctcaagtgatcctcctacgttagtctcccaaagtgctgggattacaggggtgaagcactgcccctggataaaattcttaataaatatttgaacaagggaccttgtgttttcattttgcactgaaaagtataagccatgtttgaggccaacccacatggaagccagaggacaggagggctggtccatgcaggtcagtcctgcacagggcagggtgaagaagcttggactatgggtctcaagatcccgggctgaagcatccatccacctcggcctcccaaagtgctgggatcacaggcgtgagccactgccccagcctattgctaggattcataattatcttgcagtgattactaattcttccccagcagtgttttgcagtggctgaaggcacagacttgggactccagcaggtctggttctgagtcacagctctcccacttgctgccttcgtctctccctctgagccttggatgccttctccttgcaatgggaaggacctcaatgctcaccccctggtggatagcaggagtgtgggaagcagcagagcatctcagtgaagggcatggatgctggcgctgggctgcctgggtcaagccctggctctgtgccttatcacctggatagcccaaggaggttacttttctctccatgcttcagtttctttttctttttttaagagggagtctcactctgttgcccaggctggagtgcagtggcaggacctcggctcactgcaacctccgcctcctggcttcaagtgattctcctgcctcagcgtcctcctgagtagctgggattacaggcacctgccaccacgcctggctaatttttgtatttttagtagagacggggtttcaccatgttggccaggctggtctcaaactcctgacctcaagtgatccacccacctccgcctcccaaagtgctgggattacaggcatgagccaccgcgcctggctgtgcctcattttcttcttcagtaaaatgggcataatgatatttctgacctcataaggacattgtgaaggtgaaaagacataatgcattaagtggtttcagaactgctgacccaacaaatctaagattcagtatttattcacaggtctttaatttttttttttttagaccaagttttgttcttgtcacccaggctggagcgcagtggcacaatctcggctcactgcaaccctctgcctcctgggttcaagtgattctcctgcctcagcctcccgagtagctgggactataggcacccgccaccatacccggctaatttttgtatttttagtagagatggggtttcgccatgttgtccaggctggtcccaaactcctgacctcaagtgatccgcccgcctcggcctcccaaagtgctgggataataggcatgaaccaccgtgcctggccagtctttaattttaactgtcataaaactgagagcatatcaccatcactctactgttttcaaaagctagttgtttcaccttccctttggttgttacttatgtgatacacggttacttcatttgtttttgttcatattccatttggggcatttacccctctccatgctgctttttaattttaatttatttttattttttgatagatggggtctcactatgttacccaggctggtcacaaactcctgggctcaaacagtcctcctgccttagcccctcaaagtgctgggattattcgcgtgagccactgcacctggccccaaaacacattttaaaaaagcaacatggatgattgggcacagtggctcatgcctgtaatcccagcactttgtgaggccaaggcaggaggatcgcttgagcccaggtgttccagaccagcctgggcaacatagcgagattcacatgcctgtgttcccagctactcagaaggctgaagtgggaggatcacttgagcccaggaggttgaagctgcagtgagctgtgatcgtgtcactgcactccaatctggtcgacagagtgagacccccatctcaaaaaaaaaaaaaaaaaaaaaaaaaagaaaagtaatttggaggtggtaaatgaaatatttatatagtgttaaaagttagaaccatctttagctcacttgcttttgccaaattgcctgcccaggtccttctgtggctgctcactctctccccagcagtacacatgagctcctgtttcctctcgtccttgccaacacttggttttgtcagacattttagatctttctcagtccgatggctgggaagtggtatctcactgcagtgtgtgtatttgtatttttttccaatgctactggcgagcttgaccatctttgaccttcttttgtactatttaggttttagaggaaggagttggggcctcctgctttagccagagtacagagttagctcttccctccctgtagggggttcagtctcaaccaagcccagcaaaccatgagatgggggtccccattgttcaagggaggggctgaagcccagaggagacaagggagtggccctggggtcacacagtgatgggtgccagaggcaggctccagcacgagactcctgggcccttttcccagcagagggagcccgaggcaggaagtgactgtgtgggccagggcacccagacggagcccagctgcccctcaggagctgctactggggaagggacctgccaaggccctgctgtcccctggggcatacacaggagaggggttggctgccatccagcctggcacgtttcctggctgtcccatccacccttagggcactggggccaggctgggctgagggaggtactggctcggggtctgaggggtgtagtggtgtgcagtgtgtgagcgatctgtccccctcagcctctctcctgtcctcccgtcgccatctctgtgtctctctcttccctttgtgtccctctctgtcctactctctcactcccttctctctgtctctttatttattttgagacagaatcttactctgtcacccaggctggagtgcagtggcgcgatcttggctcactgcaatctccgcctcccaggttcaagcgattccccagcctccccagtagctgggattacaggcacccgccaccatgcctggctaatttttgtatttttttatttttattttttctttttgagacggaatctcactctgtcacccaggctggagtgcaatggcacagtctcagctcgctgcaacctccgcctcccggattccagcgattctcctgcctcagcctcccaagtagttgtgattacaggcgtgagccaccacgcccggctaatttttgtatttttagtagagatggggtttcaccatgttggccaggttggtcttgaactcctgacctcaggtgatctgcctaccttggcctcccaaagttctgggattacaggcatgagccaccaccccagtctctctgtctctttttatttgacttctctgtctctgcctccttcccgtgttcctcatgtcctccttgtgtcctctccctcatcccgtaccacacccgctgctgcagcaggctctctgggaccccacctcccaggtcctggccacgtgacccagaatcctctctcggggcctgttgccaagctgtgcttcctggccaagaagccagatggtggagtctcaagtcctggctccccagccctcagggacctggccagctggtcggcctcagccacaggctcctgcttggagagatgggggactggtctcctgccagatgagaaaatgcactagaggctttgcagctgccaggctctgtccctggggaccccacactttttccaggcccacccccaccctaagcaaagctctttctctggccaaggaaacaccctcctcccccctgttctgcttctctgtcccatgtttttgtatccagctcagcatggcctaggagaggagtgcacattcagggactatacagtcccagtccttgccttattgggactcaaggcaagggaccccatcctttctttctttccttttttttttgtttttgtttttttgttttttgagacagagtctcactctgttgcccaggctggagtgcagtggcgcgatctcagctaattatgtcttcataattcacaaattatgtcttcaatttatgaaggtgctggctcggggtctgaggggtggagtgatcagtaactcaaattacgtcttcacaaatctccttgtcttcatttctgagcaccgctttcttctgtgttggcctcatggtcagggagtccctgatgttggcaggatgaccccaggatgcccggcctacctcctcccaacttaggaagcccatgggaaagagagcatctcttctgtgcacacacattttcctggcgaaaatggggagagtggccgggcacagtggctcacacctgtaatcccacactttaggaggccaagatgggaggattgcttgaggccaggagttggagacccgcctggccaacacagcgagaccccacctctaccaaaaaagaaaaagtgggaagagttttcattggcccatctaaggttacgtgctcatatctgacccaatctttatgaccagggtgttttcagtgttctgcttggccccacttgggtcatgtgattacccatgactctctaggtttcatttgcccttcaggaagctcaggacctgagagtgagttttgatgtatttggaaggagaggatggattttgggcaggcaaaaccaacaactctgcactacagaactttgaatcaagaagtcttggcttggttcttgagtttggggttttgttttgcagtcatttgtggtaatctgctaccacttaattttttaattgttattttgttttcttctctagctttcctccatctgtttagaattacaagggtaatatatgaatatattcttttgggaaaaaattttactaaccgagcagtcttcagtaaaacataaagtctcactcctatctgcctcccaatcccacatcccaaagagagcctcagttatttggtgtgcatccatctagacctctttctgtgcatttacaagtgtacctatatggatgtttaatgtttttatattatttgcttttcatgtttaatttcaatttttgaataaataaattttcatggtgaagacatcaaaacctctagggaaatcccatgggaaaattatcgccttcatccctgttccccattcattaagttctcatcccctcccccagtaagtaccatctgttatgaacttcttgtttactccagggaatttttatgcatgtgcaatccactataaatttatattcataggtaggttctaaattgcttcttcttcttcctcttttttttttttttttttgtttgtttgttgttgagactgagtttcgctctttttgccaaagccggagcgcaatggcgcgatctcagctcactgcaacctccgcctcccgggttcaagcaattctcctgcctcagcctcccaagtagctgggataacaggcgcctgccacaatgcccggctaattttttgtatttttagtagagactgggtttcaccatgttggccagcatggtgtctatctcttgacctcgtgatccgcccgcctcagccttccaaagtgctgggattacaggcatgagccattgtgcccggcttttttttttttttttttttttttgagatggagttttgcttttgttgcccgggctggagtgcagtggcatgatctcggctcactgcaacctctgcctcccgggttcaagtgattctcctgcctcaggctcccgagtagctgggattacaggtgtctgccatcacgcctggctaattttttgtgtttttagtagagatggggtttcaccatgttggccaggcaggtctcaaactcctgacttcaggtgatccacgcgccttggcctcccagagtgctaggattacaggcgtgagccaccgcacccagcatgctttttcttcttaacagtaacacttggctatttttccatactggtctggatttgtttaaccattttactcttttttattttttatttttttttaagagagggggtctagctgtgttgcccaggctggtctcaaactcctgggctcaagcatttctcccacctcaacctcctaagtagctgggattacaggcatgagctgctgcacctgacttaaccatttctctcttgatgggcattgaggttgcttccagttttttcccattataaactctgctgtgatactacaactttgtgcatctgtgccagtatttcttttttttcttaaaaaaatttttattattattatttaaaaatttttttttcaggatggagtcttgctgtgtcacccaggctgaattgcagcgacgtgatctcggctcactgcaacctccacctcccaagttcaagcaattctcctgcctcagcctcccaagtagctgggattacaggcgtgcatcaccacgcctagctaatttttgtatttttagtagagacagggtttcaccatgttggccaggctggtctcaaactcctgaccttgtgatctgcctgccttggcctcccaaagtgctgggattacaggcgtgagccactgcacttggcctatgacagtatttctttagttatattactagaaatgcaagtgctgggtcaagcagatgcatattttgcattttgatgcaaagacctgccaaattgccttctaaaaaggctctaccaatttatgccaccactgacagtggctgagtgtgcccatctcccaacatctttgccagcattagatactataagtcttttacatttttgccaacctaatgtgtagaaaagaatgccttggccaggcgcagtggctcactcctgtaatcccagcactttgggaggccgaggtgggtggatcacctgtagtcaagagttcaagactagcctggccaacatggtgaaaccccatctctattaaaaattcagaattggccaggcgtggtggctcacgcctgtaatcccagcactttggaaggccaaggcaggcagatcacaaggtcaggagatcgagaccatcctggctaacatggtgaaaccccatctctactaaaaatacaaaaaaaattagtcaggcgtggtggtgggcacctgtagtcccagctacttgggaggctgaggcaggagaatgccgtgaacccaggaggcagagcttggagcttgcagtgagccaagatagcaccattgcactccagcctgggcgaaagagcgagactctgcctcaaaaaaaaaaaaaaaaaaaatcaaaattaaccgggcgtggtgatgtgtgcctgtgatcccagctactcgggaggcggaggcaggagaatcacttgaactgaggaggcagaggttgcagtgagccgagatcatgccattgcactccagcctgggcaaaaagagcgaaactccatctcaaaaaaaaaaaaaaaagaaagaaagaaagaaaagaaaaaagaaaaggaagtcttgttttaatttctattttccagcttattaataagactgagcatcttttcatatgcttgttttgtctgttgcctgttcacatctgatgcccatttctctttttgggcagtcctttttttttgctgatgtcattcatgtatgcattgaacaaatcataactggaggcctattgtgtaccaaaaattgttctaggctttcaagaatatagcagtgagtgtgacacagcccctcccatcatgtgggtcacattctggaagcaagggaccaataaaaatacaaaagtacctgagtgcagtggctcacacctgtaatcccagcactttggaaggccaacgtgagaatagtttgagtccaggagttcaagaccagcctgggcaacatagcaagaccccatctttatgacaaatttcaaaaatgagctgggcatggtggtgtgtgcttgtagtcctagctacttgggaggctgaggcaagaggatcccttgagcccaggagttcaaggctgcagagagttattatcttactactgcatgccaacctggatgacagagcaagaccctatcaaaaaacaaaacacacacacacaaatcaagagagttgtctgatggtggtaagcactgtgaagacgaagcaggatggagggaaattctttgattgttaaactagttccttgcactgatacatatcaatttttacagtttgtcatttgccttctaactctatgaaattttggttgatgcagaagtattttttaattatttttttaattatactttaaattctagggtacatgtgcacaatgtgcaggtttgttacataggaattcatgtgccatgttggtgtgctgcacccattaactcgtcatttacattaggtatttctcttaatgatatccctcccccctccccccaccccatgacaggccccggtgtgtgatgttccctgccctgtgtccaagtgttctcattgttcagctcccacctatgagtgagaacgtgtggtgtttggttttctgtccttgcgatagtttgctcagaatgatggtttccagcttcacccatgtccctacaaaggacatgaactcatccttctttatggctgcatagtattccatggtgtatatgtgccacattttcttaatccagtctatcattgatggacatttgggttggttgcaagtctttgctaatgtgaatagtgccacaataaacatacgtgtgcatgtgtctttatagtagcatgatttataatcctttgggtatatacccagtaatgggatcactgggtcaaatggtatttctagttctagatccttgaggaatcgccacactgtcttccccaatggttgaaccagtttacattcccaccaacagtgtaaaagtgttcctgtttctccacatcctctccagcatctgttgtttcctgactttttaatgatcgctattctaactggtgtgagatgatatctcattgtggttttgatttgcatttatctgatgaccagtgatggtgagcattttttcatatgtctgttggctgatgcagaagtatttttatgtgatcaaattataaatctttccctttatgttttttatgcttggaaagatttttctccatcccaacattataaaagcatttgcccaggttttcttttagtgccttatggatttacttactctgtttaggtctttaatccatctggaattgttttcagtacaaacagcaaggaaaggatccagctaaattggttagccattggcccatgaccattcattaaataatccatctttcccttggggatttgaattggcacctatgaaacacatgaattttcctgtgtatttgggtctgcttttgcactttctgtctattcctaagacacagcagccatccaaattactatagctttgtatttatttttgataatttcttactatcaaatttttttatccggtaatcccagcactttgggaggccaagatgggcagatcacttgaggttatgagtttgagaccagcctgaccaacatggtgaaaccccatctctactaaaaatacaaaaaaaattagcaaggcatggtgtcaggtgcctgtagtcccagctacttgggaggtcaaggcacaagaatcacttgaacctgggaggtggaggttgcagtgagctgaggttgcccactgcactccagcctggatgacacagcacccaggctgatttgttcatcctgaggtcaggagttcaagaccagcctggccaatatggtgaaaccccatctctacaaaaatacaaaaattagccgggcatgatggcaggtgcctgtaatcccagctactcaggaggctgaggcgggagaatcacttgaagccaggaggtgaaggttgcagtgagccaagattacgccattgcactccagcctgggcaacagagcgagactccatctcaaaaaaaaaaaaagcgttaacaaaaaattattactatatttgatggtaataattttggaaagttgactctttggacaaattctttaacttctcttggccttggtttcctcctctgtaaaacagggagactaccaatcttgaaggttgttctgggaattagtgaattaatggaccactttagttccggggtcaggtaagcctctttgagaaggtaatactccagctgaaatctgattgacaaggaagagcatgcctggcagaggaaacagcaaaggcaaaggctccgaggcagggactagcttagtgtgatgcaggttcatgcggagcgcatcgctcctggaggggactgaacaaggagagggtggaagggtgggccgcggtgaggggtctggctgtcaccataagggtactggagagccacagcaggatcaggagggcgggtggggcccattgaccctgcctctgtccccacagtccatggagtcgcaggtggaggagtggtaccgcgaggtgggagagctgcaggcgcagacggcggcgctgccgctggagccggcgagcaaggagctggtgggtgagcggcagaacgcggtgggcgagcgcctggtgcgcctgctcgagccgttgcaggagcgccgccgcttgctgctggcttccaaggagttgcaccaggtggcgcacgacctggacgacgagctggtgaggccagcgcaggggcctggggcggggcggggcggggcggtggggcggagaaggtgggcatggggcggggctgaagatggagacggctgagaccctcccactcatacgctgaaagacgcattcagccgttcactcattcattcattcacactcatttactcactttgaatcattcgttgatttattcatgaagtcactcatttatttattcactcatccatagtttgttctttcctccactcatttatttacttaactattcattcattcactcctctgttcctcattccatcactcaatttcctgatttgctcattcatttgttcactcagttgatcattctagccccagccctgtgtttggatgatagtggggccacaggggtggccaaggcagaccccattgtgccccagagggttcagagtccaacggggaaaacagacttgtccccagacagtgacaattcagggtggttaggaatatgataggaaacaagacctgtatgtgcaaaggccaacggtgtgagcctggcttaagtgcagacagcaagaaagagtatgtcaacagaggagactgagacaggtgtggtggtgcctgttgtcccagctacatgggaggctgaggtaggaggattatttgagcctggggattcgatcccatctcaaagaaaaaaaaaaaacaaaaaatggaggaggctgaatattcaactgggctcttaggcaaggaagggcctgggatgccgtgcaggtttaaagtttagttgcgatgcaggggttcttggatgcattctccccttgacctgcttcctgtgtcctctccaggcatgggttcaggagcggctgccactggccatgcagacagagcgaggcaacggtttgcaggcggtccagcagcacatcaaaaagaaccaggtgagcagagccaggtgagggagcgagttaggacatttggatacatgtgatagaaacagctgaaggtggttaaagccaaaacaatgaatgtattggcttttggaattaacaagactgtggacagcagatacagatgtatccaggtgcttccatatattttcatgactcttggctctattttttttttttttttgagatggagccttgctttgttgcccaggctggagtttagtggcacaatctttgctcactgcaacctccacttcctgagttcaagcgattctcctgcctcagccatccaagtagctgggattacatgtgtgcaccaccacacctggctaatttttgtatttttagtagagatggacggcggggggtggggtgtttcaccaggttggccaggctgggctcgaactcctggcctcaagtgatccactcgcctcagcctcccaaagtgctgagattacaggtgtgagccaccgcgcccggcctgtttgtttttctgcatgagctttcttcttaggccagtcctcctctcctggtgataaaaggcctccagtggattcaggtttacctcccaccagcaaaactgaagagaatttcccacctcaataatgtcagcagtagtctcaggaataactctcattggctcaccatgcccatggcatcccacgcccatccctgaactaatcatgatggatggggtttcggactgctccttgggctggcctggttaagcgccctcccctggaacctgctgctggaatcagccttagcttaattaccaaggctgagatggaggcaaagggggtttcccaaaggaaaatcaggggcttgagactagaaggaaggggaatagctattggacaaggaaaaagtaaaacaacaacaaacaaaatcacaaaacatcgagttagcctggtgtgatggtgtacccctgtagtcccagctactctggaggctggggagggagggtcccttgagtccagaggtcaaagctgcagtgagccttgaacaccccactgcactccaccctgtgcaacagaatgagaccctatctctctctctctctcacacacacacacacacacacgtcccccaaaacaaacaaacaaaaacacccatagggacaaaggacagagataatcagcaagaggatactactgccccctaacctgagcaaggtgggggagggggcctttgagctcctaaaaaatctctgaatctgttcattcctctggggctcagtttccacatctaaagtagagttggtttagagcagtggttctcaaactgcatacgaagggaaccccttggtcaaagcaactatttcaccaaagcctaaagcaagacataaaagaggaataataataataaggcattgtgccaggtgtggtggctcatgcctgtaatcccagcactctgggaggccaaggcaggatgatcacttgagcccaggagtttgagaccagcctgggcaacatggggaaaccccgtctctaccagaaatacaaaaattagctgagcatagtagaaggtgcctgtaatcccagctacctgggaggctgaggcaggagaattgcttgaacccaggaggcagaggttgcagtgagccaagatcacaccactgtactccagcctgggtgacagagtgagaccctgtctcaaaaaaaaaaaaaaaacatcgattaaagatttactaagtgctggctgggtgcagtggctcatgcctgtaatcccagcactttgggaggctgaggtgggtggatcacctgaggtcaggagttcgagaccagcctgaccaacatggtgaaaccctgtctctactaaaaatgcaaaaaattaaggccaggtgcggtggctcacgcctgtaatcccagcactttgggaggccgaggcgagtggatcacgaggtcaggagatcgagaccatcctggctaacacggtgaaaccgcgtctctactaaaaacacaaaaaattagccgggcgaggtgtcgggcgcctgtaatcccagctactcgggaggctggggcaggagaatcgcttgaacctaggaggcggaggttgcagtgagccaagattgcaccattgcaatacagcctgagtgtcaagagcgagactccgtctcaaaaaaaaaaaaaaaaaaagattaaaaaaaaaaaaagatttactgtgtgctaagtactgtcttagggtttatgctgattatttaatttaatcccctctataaccctatgaggtagatattgtcattatcctcatttcaccaaacaatgtatgttggaagaatagggcactgaaggatggtggggaggtgggtctacagattattttggaagcttcctgatcattctgcagtaggtagagttatttaagagactggagttttgctgagattttgttttcctgtcttgatgaaaatactcttggctgtcaacagtgtgggcgacagaactggcttatcgttgtcatggttgaggaaactgatcaagtgcacttagtacttaaaattgggggagctcagctgtgtgtgcagtgagagtgctggatacacaggggctgttaagccaaaaatagctgcaaatatgatgcatttggtgcatgcagactcagttccaagtgctccatagtttatcaccttataacaaccccgcaaggtagattatctcagcctgatactagctgtgtgaccttagcaaattcctcaccctctctgtgcctcagtcttctcatctgtaaaatggagatggtaatgttgtctggctccataggttgggagtgaggaggtgtgaggctatattatgtaaagctcttacttagcaaagcacctggcaggtagcagggtagcagacactcaagaatcgttggctggccgggcacagtggctcatgcttataagcctagcactttgggaggccaaggtaggaggatcgcttgaggccaggacttcaagaccagcctgagtaacatagcaagacctcgtctctccaaaaatattttttaaaatagcagggcatggtggtgcacacctgtagtcccagccgcttgggaggctgaggcaggaggatcacttgagcccaggagtttaaagctgctgcattccatcctgggtgatagagtgacaccctgtctctaaaaaagcaaaataaggagaggacttgctggctgttattatctttatcagttgagtcacacaaaaagttaaataacgttaaggcacacaaaaagttaaaaaagactcacaaaaagttaaataaggtactctgtaagtaaataaggttaaggcacacaaaacgttaaataaggtactctgcaagtacagagctggttgagggaaccttctgggggatggaagtgttccgcacgctgatctgggcacaccggtgtatgtgtctgtacaaatgtgtgcaactgtatacctaagatttgtgcactctaccgtatacaaatgatacctcggctgctaagctgcagggtttctgtattagggcccatcttgggtcggcaagcggcttggctcagagcacagtctctggaaccagcctcctgtgttcaaatcctgtcactccttactggctgcttgttcttgggcgccgtacttcgcccctctgtgcctgttttcccacctgcagcaagcatagggttatgatgagtgagggagtatcagcaaaatgtttacatggtcttggcacgtggttagcgagctgggggtgcttgttaattgccccgtgggccgtgccagtagcagaggagcgtgtggtcttgcagggcctcggaacgccccctctccacccacatccccttacctcctgcccccagggcctgcggcgggagatccaggcgcatgggccgcgcctggaggaggtgctggagcgcgcgggcgcgctggcgtcgctgcgcagcccggaggcagaggcagtgcgccggggcctggagcagctgcagagcgcctgggccggactgcgggaggctgccgagcgacggcagcaggtgctggacgccgccttccaggtggagcagtactacttcgacgtggctgaggtggaggcgtggctgggcgagcaggagctgctcatgatgagtgaggacaagggcaaggtgcgcccgagctgggggtgcggagggcctgggggcgctggagccgggggccgccgctgccgcctcatcgtgggcgctttgtgcccccaggacgaacagagcaccctgcagctgctcaagaaacacctgcagctggagcaaggcgtggagaactacgaggaaagcatcgcgcagctgtcgcgccagtgccgggcgctgctggagatggggcacccggacaggtgggcgggcgcgtggccagttcacaggaatggtccagcaggacctgaagcttcgctgttgggagttggcgcagcgctggaattggacgttgggtgggagaggtcctccttgctgtgtgctggagccctcgaatttggcaagtgggcgggccggaatggggggacacggctcagggatggttgagagggtggggccaggagcacctggatttgagtgtagtagtggggaccttgtcgggggagaaaagagtaggcgatgtctaggactggggtagagaagaatttactcaggacaggcaaggggctctttctactcagtgtctgggaggacagaaaagcctgtgctgagattggctatggcggtggggctggagacctcctggtgcagtggggtgatgttgcctcgtgtaggcggatgctgagctccaggcctggaccagggatggaatctgtaaggaggtacagagagagacctctgtccaagtgggctcagagattggggctagaggtgggatgcattggctggggacccaacctgggagtccagagtcccaccgaggttcctggataggaggggcgtgagactgagatagaaaccgggtgaggctgccgaggtgggcggatcacttgaggtcaggagttggagaccagcttggccaacatggtgaaaccctgtctctactaaaaataaaaaattagctgggcatggtggcacgtgcctgtagtcctagctactggggaggctgaggcaggagaatggcttgaacctgggtggcagaggttgcagtgagccgagatcgcgccactgcactccagcctggtgacagagcaagactccgtctcaaaaaaaaaaaaaaaaaaagaaaagaaaaaaaaagaaaggaaactgggtgaggctggatagaggtgagcttatccatttagggaagcggagctttccctgcatgctgaaatgcagggctttctgaacccaagacttgcagaaaacagagtcctggccaggtgtagtggctcacacctgtaatctcaacactgggaggctgaggcaggaggatcgtttgagcccaggagtttgagaacagagggaacatagtgagacctcatctctacaaagaaatcaaaaagttagccaggtgtagagtcacgtgcctgtggtcccacttgggaggctgcaatgggaggattgcttgagcatgggaggtggaggctgcagtgagttgtgatcacaccactgcactccagcctgagcaacagagcaagaccctgtctccaaaaaaaaagaaaaaagaaaagaaaacagagctctacctggggacacagccgtgtctgaagattccaaggaaacacagccctgtcctggggagggggtttaggggggtcacgctctgccccagaagtctcaggggtccatccctgcccctccatgtcccccttcagcgagcagatcagccggcggcagtctcaggtggaccgcctgtacgtggcgctcaaggagctgggtgaggagcgccgggtggctctggaacagcagtactggctgtaccagctcagccgccaggtgagcgagcttgagcactggattgccgagaaggaggtggtggctggctcacccgagctcggccaggactttgagcatgtctcggtgagcatcattagtaataagtgataccaggagctaccactaaggttctctgggccttagtttcctcatctgtagtatgaggataataacagcacccgcctcatggctctgctgtgagacaaatgagttaatataacgtaaagcactgaggaccctgcttggcacacatgctgcctcacacagtgttggttattattatcagcttattattttattgttacttattgttatttttattgttactgttttgttactattcttgccaggtgttcagtaagtgttagatattattttttatgatgatgatgatgatgatgattatcattactcttacctgccacaaaatggtagcctctgccaggtgtggtggctcatgcctgtaatcccaacactttgggaggccaaggcaggtggatcacttgaggtcaggagtatgagaccagcctggccaacatagtgaaaccccgtctctactaaaaacacaaaaaaatcagctgggtgtggtggcacatgcctgtagtcctagctgtttgggaggctgaggcaggagaattgcttgaactggggaggtgaaggttgctgtaagtggctattgaaccactgcacgccaacctgggcgacagagcaagactctgtatcaaaaagaaaaaaaaacattgtaggctggagggggctggtgtatgctgcccctttgctcactttgctgtacccccccccccacttcctgatggcaggtgctgcaggagaaattctcagagtttgccagcgagacaggtatggcagggcgggaacggctggcagctgtgaaccagatggtggatgagctgatcgagtgtggccatacagcagcggccaccatggccgagtggaaggacggactgaacgaggcctgggctgagctgctggagctcatgggcacacgggcccagctgctggccgcctctcgggagcttcataagttcttcagtgacgcccgagagcttcagggacagattgaggagaagcggaggcggctgccccgcctgaccaccccgcctgagccgagacccagtgccagttccatgcagcggaccctgagagcctttgagcatgacctgcagctcctcgtgtcccaggtggggcgccggtggccatcagggcaggtgggagggcctggacagctgtgggcagcagagtgggcaaaaatcaggctgtggagcaggtcgaaattaggcagtggcacagacagaaagcggactacagaacaggaagaaattagataatggagcagatagaaaatggactgatggaatgatatatagaaatcaggtattggcagggaaaagtggtaccttagaaggtctcacagatattaaacagcttctggctgggcgtggtggctccctttgggaggccaacgcaggcggatcatctgaggtcaggagtttaagaccagcctggtcaacgtggtgaaaccccatctctactaaaaatacgaaaattagccaggtctggtggcgggcacctgtaatcccagctacttgggaggctgaggcaggagaatcacttgaacccgggaggaggaggttgcagtgagcccagatctcgccattgcactccagcctatgtgacaagagtgatactctgtctcaaaaaaaaaaaaaaaaaaaaaagcttccaatagatattgggcagtggttctcctaaaactgtgagttttgcctaaatccagatcaagggtctaaagggaattttgagaagtctgagaggaatttggctgtggtgtagatagaaattagacgacagacaaggccaggtgcggtggctcacgcctgtaatcccaacactttgggaggtcgaggcgggcagatcatgaggtcaggagttcaagaccagtctgaccaacatgatgaaaccccgtctctactaaaaatacaaaaattagcaggaatggtggcgggcacctgtaatcccagctacacaggagactgaggcaggagaatcgcttgaacccgggaggcggaggttgcagtgagccgagatcgcgccactgcactccagcctgggcgacagagtgagactccatctcaaaaaaaaaaaagaacttagataacaggtctctgatggaaatcatatgacttttctgaaattaatttgatgggggcgaatttaatgaaaaaggcaacagagatattagaaattaggcagaggttctggccagaattcggatgtggatctgagcagtcagatggaaatgaagctgcaggcccaatacaactcaggcagcaggaaattgggttgcagttctaatggaaggtagaagttgggcaatttttgtttgtttgtttgtttatttttgagacagggtctcactctgtcacccaggctggagtgcagtggcgcgatctcagctcactgcaccctctgcctcccaggcttaagcgattctcctgcctcagccttccaaatagctgggattacatgcacgcgccaccacacctggctaatttttatatttttagtagagacgggatttcaccatgttggccaggctggcctcgaaatcctgacctcaggtgatctacccgtctcggcctcccaaagtgctgggattacaggcatgagctactatgcccagctggcaattattattattattattattattattattattattatgaggcagagtctctctttgtcacccaggctggagtgtagtggtctaatctcggctcactgcaacctctgcttcccgggttcaagcaattctcccacttcagcctcgagtagctgggactacaggtgcaagccaccacacccagctaatttttgtatttttagtagagatggggtttcaccatgttggccaggctgatcttgaactcctgacctcaagtgatctgcccgccttggcctcccaaagtgctggggttataggcatgagccaccgcgcccagcccagttattttttataaatcctacaaatgacttagaaatcaggctgagagattcatagtaataagtggtggatctgttagagatggggaggtcacaccaaaataaatcaggagattgaaccaacagagtgagcagcaggctgagcacagtggcttatgcctataatctcagcactttgggaggccaacctgggaggattgcttgagcccaggagttcaagatgagcctgggcaacatagtaagactccatctctattacaacatatatgtatatatcctgatacagtggcatgcacctgtagttcagctattagtaggctgaggcaggaggatcacttgagcccgggatgtcaaggctgcagtgaattgtgtttgtgccactgcactgcagcctgggcaacagagcaagaccctgtctcagaaaaacaaacaaaaaacccaaaacccaaaagatagagtgagcagagctcatacagcagaatgaatggaaattgggcaggggagtaatggcaattgaacagccgtcgtgtaggaaactgggctactatgaaggagtgggtttgaaataaactgagttaaaaaaaaattagcacatctaaaagacatcaaagtggaaaggggtttcctgaaagacccaaggtaggggtgggcctgcctgaaaacacaggtggcagacccaatagaaataaagctctcagaccaaaagaaatcaggcagtgggttgaaagagatgtggtagtagatctaaaagaagtcagaatgcgggtaagtcaaagagaaatcaggcagcagatatgacaggagcctggctgtgggatcacagtgtgaggctccttatatcttgaggttctgcgctggagcagatggtgggagggagggcacagcctgggccccgtggagggctggcgcccgacctggcatgcccttcaggtacggcagctgcaggagggggcggcccagctgcggacggtgtatgcgggtgaacatgccgaggccatcgctagccgggagcaggaggtgctgcagggttggaaagagctgctgtcagcctgtgaggatgcccgcctgcatgtcagctccacagccgacgccctgcgcttccacagccaagtccgcgacctgctctcctggatggatggcatcgccagccagattggggcagccgacaagcccaggtgcccctcatccctcctcgggcttcctgcctccccctggtggcctaccccagccacccccagcccattgacagcccccttctcaatggaatgacaacagccaatatctgtgtggcgcctctgtgtgctaggcactgttctaggtgcttcgtgtgtattcagaccccttttttaggcctgtcattggggacttcggtcatggggcatccttctgtccgctgtccttcccagttgcctattattaccctctccatgggatgtcacagcatgaaacaggctaaagacaggatgggcaagggaggtgtgggactgtatttgtgagggtgggtgaagaattctaacaattccagcatctcagtggcttcattagtgggcatgggcttattgctcacatagtggttggatgtgagtgtccagcagaatcctgtcccctggtgattgggagccagggtccttccatcatgccaccctgggagtcacatgctggaccctctgcatcccgctgcagatgggaaaagatagcaggaggatcacacagaaggttttagggataaagccggcacccacacactgccagcccggtggcctaacctgtctgccagggaggctgcaaatttttttttctcttgagatggagtcttgctctgttgcccaggctggagtgcagtggcacaatatcacctcactgcaacctccgtctcccaggttcaagcgattctcctgcctcagcctcccaagtagctgggactacaggcgcccaccaccacgtctggctaattttgtatttttagtagagaaagggtttcaccgtgttggccactctggtctcaaactcctggcctcaagtggtccacctgcctcagccttccaaagtgctgggattacaggcataagccaccgtgcctgacctaggctggaaatttagtttcatggtgtggctaggaagaaaaggacctagggaatcagggacacctggcattgcttctgggaatgcagatcctgcagcctgcattcatttactcagcaaatatgtattaaatgcatatggtgtgccatgtggtgagcaaggccaagcacttgccctgagacagattgcattctcatagcacttattactttctgaaatatagcatggggatggggcacagtggctcacgcctgtaatcccagcactttgggaggctgaggcaggcagatcacctgagctcaggagtttgagaccagcctagccaacatggcaaaactccgtctctactaaaaatacaaaaattagccaggcatagtggtggacacctgtaatcccagctacttgggaggctgaggcaggagaatcgcttgaacccgggaggtggaggtcacagtgagccaagatcgtgccactgcactccagcctgggtgacaagagcaaaactccgtctcaaaaaaaaaaaaaagaaaagaaaaaaaaatgaaatatagcgtgggtatatatacatacataggaagggaatgatagctggcaaagtctctctgaggatgtgcgtttgactggagacctgaatgaagtgatgggtgagtcaggtaaagttttgagggaagagttttctaggtggagggacccacaagtgcaagggcccagaagtgggctgtagttaggcatgtgtgaggaaaagctagagatcactgtggccagatggagggagggagtgagggagtgtagggtgagaggaagtgagtacagaggggcactggggccctggaaaccacacatggtgaggagcatgccttctctatgaggaacgtgggagccatgcgagagtttagagcagagtggagtgatgtgatgtgtacatttgagaaaaataggccgggcatggtggcttatacctgtcatcccagcactttgggaggccaaggcgggtggatcacttgaggacaggactttgagaccagcttggccaatgtggcgaaaccccgcctctactaaaaatacaaaaattagctgggtgttgtggcatgtgcctgtagtcccagctactggggaggctgaggcaggagaattgcttgaacctggaaggtggaggttgcagtgtgctgagatcgtaccactgcactccagcctgggcaacagagcgagactctgtgtcaaaaaaaaaaaaaaaaaaaaaaaggctgggcacagtggctcacacctgtaatcccagcattttgggaggctgaggtgggtggatcacttgaggtcgggagttcgagagcagcctgaccaacatagagaaacctcatctctactaaaaatacaaacttagccgggtgtggtggcacatgcctgtaatcccagctacttgggaggctgaggcaggagaattgcttgaacccaggaggcggaggttgcggtgagccaagattgtgccattgcactccagcctgggcaacaagagcgaaattccatctcaaaaaaaaaaaaattaaatatacagggaagtaaaggtaacccacatgtgtatcgtgaacacttggcttgaacaaccatcaacatttggccaatctagccaaaagaggtggctcacgcctgtaatcccaacactgggaggccaaggcaagaggatcacttgaggccaggagtttgagactaccctacgcaacatagtgagaccccatctctacaaaaaagaaaaaaattagtcaagcatggtggtgtgcatgcctgttgtcccagctacttgggagtctgagggaggaggatcacttgagtccaggagggtcaggctgcagtgagccatgattatgccatttcactccagcctgggtgacagagcgagattctgtcttaaaaaaaaattttttttttttaattagctgggcattgtggtgcatgcctgtagtcccagctaccctggaggctaagccaggatgatcacttaagcccaggtggtagattcaaaccatagcatgaagctatgattgccaactgatggaaccttcagaaacttggaatttgttttggacataagatggcttagaatggtgctgtccaatagttatataacacgagccacaaatgcgagccacatatatactttaaaatcttcttgtggccatactaacaaagcaaagcaaatgaaacttaattttagtaatacatttttatttaacctgacatacccaaagtattatcacttcaacaggtagtcaatattaaaactattaatgaggccaggcagtttcgaacttctggcctcaggtgatccgcccgcctcagcctcccaatctcagccaagcggagatcgcaccactgcagtccagcctaggtgacagaaggagactccatctcaaaaacaacaacaaccaaaacaaagaaacaaaactattaatgaggccaggcgcagtggctcatgcctgtaatctcggctgagattgggaggctaaggcaggcggatcacctgaggccagaagttcgagaccagcctggccaacatgccaaaaatccatctctactgaaaatacagaacaaaaaattagccaggcttggtggcgggcacctgtaatcccagctactcgggaggctgaggcaggagaattgcttgaacccagaaggtggaggctgcagtgagccaagatcacgccattgcactccagcctgggcaagaagagcaaatctctgtctcaaaaacaaacaaacaaacaaacaaaggctgggtgcggtggctcacgcctgtaatccctgcactttgggaggcctaggcaggcggatcaactgaggtcaggagtttgagaccagcctgacaaacatgttgaaaccctgtttctactaaaaatacaaaaaaattagccaggcatggtggcaggtgcctgtaatcccagctactcaggaagctgaggcaggggaatcgcttgaacctacctagaagggggaggttgcagtgagcggagatcgcaccactgcacaacaacaacaaaaaactattaatgagacattttacattcttttttacattaactccacaaaatctggtgtgcattttacactttacaccaaaattcagactggccacatttcaagtgctcacatgtctagtggctactgccttggagagcacagacttggaacgttaaaatcattggctagtggaaccttcagaagcatagctagaaaaagtttgaaaatttggatcttggctgggtgtggtggcttatgcccatagccttgaactttgggaggctgaggcaggtggattgcttgagcccaggggtttgagaccagcctgggcaacatagcaagaccctgtctctacagaaaatgaaaaattagttgggtgtgatggtgtgcacctgtggtccccgctactcaggaggctgaggcaggaggattgcatgagcccaggaggttgagactgaagtgagctgcaatcttgccactgcactccagtctgggcaacagagcaagaccctattaaaaaaaaaaaaaaggaaaatttggatcttgaaatcctagaaggttagaatcaccaaagtgtgaaattttagaaacttggaaaatttgaatcattgaattagtgaaccatggaccctcagaatttggtcatcgaaagtaggtgtctcagtctggtttggtgactcaacgcctgtaatcccagcactttgggagactgagatgggaggatcacctgaggtcaggagttcaagaccagcctggccaacatggagaaaccccatctctactaaaaatataaaaattatctgggcgtggtggcaggtgcctgtaatcccagctactcaggaggctgaggcaggagaatcgcctgaactcgggaggtggagtttgcagtgagccgagatcgccccactgcactccagcctgggccatagggtgagactttatctcaaaaaaaaaaagaaaagaaaagaaaagaaaagaaagtaagtgtcttgaggtggtatgggatgtcagcctcaaggatttggggtcaccaggagccacatgtatggggcaggctgaggaggctccctgtggctcagatccctgcctgccacccactgcagggacgtgtcatcagtggaggtgctcatgaactaccaccagggcctgaagactgagctggaggcgcgggtgcctgagctgaccacctgccaggagctggggcgatctctgctgctcaacaaaagtgccatggctgatgaggtggggagcagggagggggtccccctctgccacccgggcacattggggtggaagccattccacaccctgacttccctcccacccacctgccactcccagatccaggcacagctggacaagctgggaaccaggaaggaggaggtgtcggaaaagtgggaccgccattgggagtggctgcagcagagtgagtgggggcccaggcacacgtggttcaagggcacagggacatgctccagcctgtccagccaaggcccagagggtgacaggagcatgctttgcaccctacccatgggtctccagaagcaaacataagggcctggaagggtggacaagggggctgccttgccattgaatacccacccttgaaaaaaaagtcttaaagtcctgggtggggggacattaaggaaggaggaatgggagtcagaaaggaggaatgatgcccactgaaatagccccagcctctgccattcctgcagagcccaggatggtcagggctcgggtatggaaagccggaggggtgtggaaggccaggggaacagccattgcccccaggaagggccccagatgccccagaatccttaccctgcatgcccctcctcagtgctggaggtgcaccagtttgcccaggaggcggtggtggctgatgcctggctgacagcccaggagccgctcctgcagagccgggagctgggcagcagcgtggatgaggtggagcagcttatccggcgacatgaggccttccgcaaagcggctgcagcctgggaagagaggttcagctctctgcggcgcctgaccacggtcagctccccagatactgccccattacccccacccccaccaagacccccacacccatggctctatatgagacagacacaccgagacatggtgcttggtcctgtgttgtgtgagtgccaagacagactcttgctaggctcccagtggagcagagggacagacctgtcaccagtgacagcccagaatgtcagggatgtgataggggaagaacaagcagagggatagtgcctgggatgggggagtgggagggggaactggcctgggggattctattctgagacttgaataattaggtgaagagaatgtagtaataaaaaggattaggccaggtgtgacggctcatgcctgtagtcccagcattttgggagaccaagatgggtggatcacttgaggccaggagtttgagaccagcctggccaacgtggtgaaaccccatctctactaaaaatgcaaaaattagctgggcgtggtggtgcacgcctgtaatcccagctactcgggaggctgaggcaggataatcacttgaacttgggaggcagaggttgcagtgagccaagatcgtgccactgcctgggtaacagaacaagactccatctcaaaacaacaacaacaataaaaaaaaaacaacaaaaaaaaaccgcttaaaggctgggtggggtggctcacacctgtactctctttggaagcctaggcgggaggatcacttgaacccaggagttcaagaccagccttggcaacatactgagaagccgtctctaccaaaaccaaaagcaaacaaagaaaaaacagccaggcgtgatggcacgtgcctgtagtcccagctactcagaggggtgactgagactcgaggatcacttgagcactggaggtcaaggctgcaatgagctatgatcttgctgcttgcactccagcctgggcgacagagcaagactgtctcaaaaataaataaataaataaataaataaataaataaataaataaataaagtcttaaagtcctgggtggggggacattaaggaaggagaaatgggagtcagaaaggcacgcagagcaattgatttacccaatttttaaaaaagtgatttagccaattcttaaaagagcaataggtgtttgccggagagaataggctttaagttcttggcagagagcaaagcatcgcacaggcctggacaccttgctttttcaaggaactggtcaattgagtgatgaggcagaaaaacccaggccgcctccccggacctcccccttaccccgccccggccccacgcctccaacctaaccctggtccctccatcctcagatcgagaaaatcaaagcggaacagagcaagcagccgcctaccccactgctggggcgcaagttctttggggaccccacggaactggcggccaaggcggcgcccctgctgcggccagggggctatgaaaggggcttggagcccctggcccgccgagcctcggacacgctctcggccgaggtgcggactcgggtggggtatgtgcgccaggagctcaagcccgagcgcctccagccgcgcattgaccggctgccggagatcccggggagggtggagcccgcggccctgccggccgcaccagaggacgcggcggagacccccgcgacccccgcggcggcggagcaggtgcggccacgaccggagcgccaggagtcagctgatcgcgcggaggagctgcccaggaggcggcggcctgagcggcaagagtcagtcgatcaatccgaggaggctgcgcggaggcggcggccggagcggcaggagtcagcggagcacgaggcggcacacagccttaccctgggccgctatgagcagatggagcggcggcgcgagcggcgtgagcggcgcttggagcggcaggagtccagcgaacaggagatgcccatcagaggagacctggtcaaggggtgaggtgcccgccttatgaccagaaagtgaggggaggggaaagcggagagctcctagaacccctcaggcccagtgaaagggcttcagggctcagaacttcccaaagaaggagatatcgccgcggtacccattttgcagaggtgtaaactgaagctgcaagataatcgatgtgcccattgttacacagaaaggggagcccttcctgttgaaagaaaaggcagactgcctttctccagacgtaggttctcggcccctgggttgtgactcctgcatcaagtctcccgggtgccccgaggcagggattttgtcctctctgtgcctcagtttgcccactgggctaatggtggaaccctcacctccttgattggagaggagaccctttatcacaattctctcagcagccttatgaagtgggggctgttgtcttctccattgtatgactagggcaactgaggcacaaaaagggcaagtcactcagcttaaacgaaccaggactttcagaatccagagttggccagtgtgtgttgtgcagatctgtccagtcagctgagtgtgtctccagaaagaggcctttggtcaggagacaatgacttcttgattctttttaaattgcacatttcatgaacatttgctgagtgcccactctgcctggcatgtgctgagtcgagcggtgactgaaccagtcccatccctgactttagagactcacagtccattgggaaaaacaggcttgtcatcaatgatgaccgagaattatctgggctggaatgggggcgattgggggactggagagtcaggggtgggtggagaaaggcaacgtttgcaagttgttctttgtgctgcttaaaattcaaaggggcatctgggcgcggtggctcacgcctgtaatctcagcactttgggaggttgaggcgggcagatcacttgaggtcagaagttcgagaccaacctggccaatatagcaaaaccctgtctctactaaaaatgcaaaaattagccggcatggtggcgcacgcctgtagtaccagctacttgggaggctgaggcaggggaatcgcttcaacacaggaggcagaggttgcagtgagccgagatcatgcaccactacactccagcctgggcaacagagaaagactccgtctcaaaaaaaaaaaaaaaaaaattcaaaggggcgagaggtttggtcttccattcagcagacacgtcccaaacacctgtggtacctaaggcgagcatctgagagaaacagctgcagaagtgggcaggggcctggcacttccagctaagaagtggaggctcctctgcccagccagacaggtccatgggagaaggaaccctggtttcactgggtctttctgtcccccatcccccaggaaggccaccctggctgacattgtggaacagctgcaggagaaagaggcaggcccagggctgcctgctggggtaagttgagcctcggatgggtggggataggaggacccctttttcagagcaggaggcaggatctcagaaacagccagtgcctagccctggcaggacccattccctacctggaccctgcagagacagcatggactctcagggtccccagaatctgaaaatgtcccccttagaaagacggggcacctacctaagagacccctactgcccctccacacacacacacacacacacacacacacacacacacagacacacacacacagacacacacacacagacacacagacacagatacacacacagacacacacacacagactcttcccacatctgtcctggactccgtatttcttcagctcagtggggtcccaaatttcttcatagcctcatacacacacacacagaaggaagccccaggtttctcctgcagacagtggggacacgccctgcttgcacccccacctccagagatctggctgcctctttccaccaccgagagagattccaaaccaatgagtcctaacagactcactcccaagacccatggggccctaagaattgggcctccaaccctgaggtcctcccatactcgcctccgagacaaatggccctgtagacagatgggaccccagacccatgactcccccaaacagatgacccccacaccctctccatggacagcacccctcttccccctcccttcacacagccgtcgctgcctcagccacgcgagcttcccccaggtcgcctgcccaacgggcttgagctgcccgagcggacacctcggccggaccggccccgggcgcgggaccggcccaagccgcgacggcggccgcggcccagagagggtggtgagggcgggggaagccggcgctcgcgctccgccccggcccagggcggctccgcccccgcgcctccgccaccgcccactcacacagtgcagcacgagggcttcctactgcgcaagcgcgagctcgacgctaaccgcaagtcgtccaaccggtgagcgtgtgggcggggctttggaaggcgggtctcaggctcagggtgaccattgcgtggagcggtgggactgaggagggggtgtggctcaacttcaggccctccagcaggtggcggtagtaggtggggccagagctggggggtggtggtggcttaaatcaagaaagccaaccaatgagcaggagggggtgtggtttaacgtcaggccctccaacccgtgggggtagtaggtggggccagatgaggggtggggctcaactttgatgattccaaccaatgaacaggaaggggcaggacctaaggttagtgcatctaatggatgatgggtagagcttaggtgggaacagaaggaaaatgttctgaaagtgagtaaattggaacctaacctcttagcaaccaacccaggagttgatcagctaaatagcaaagagggaggcatctagttgagaaggtttcaatggcttgtcgtggagcttggagaggtcactcaaccaatgagtggggtgggtctacccttgaagtttcaaattgggggagggtccgaaaacgggcagagcccaaactaatgagggtaggggttgggaagggggagtcatctcttacaggtttccaaatgagggtctagccatgatgtgcctgctcttggggagtccagctcctgcttgtccaccctctttttgtccaactgagaggcagaatctggggacaagtggagccaaaaaggggtatcaccggccagtaatggagtgagtcccaagatatgaagtgggcaggacagattcagattttgctagtggaatctgtaggtggtctttcttcctcgtacctaatgccaaggtaggaataaacaagggcacctagtatgttttgctttgggagggattcctccaggatcgaggctttggatgactggagagacaggaattctttattccagacagtagaccaatagactttccttgagaaagctccatgagtggggaggattgagtggagcaaaggcttatggaggagacagcttaagacttaccttcaggaaattcagtatgggaggggataaggaagggaaatctcagcctgggcaaaggcttgatactgagagacttaaatgctcccctcagggcagcaacagccttaaggaagagcattttaggtccaactagggcgcaactagggcgcaaaggtccagaggtaggaaggctcagacatattcagaccttgaggatgttaatgaagagttattaggcagagtgctgcggctctgccttgagccccatcttgtcgctccaggtcgtgggtgagcctgtactgtgtgcttagtaagggggaactgggcttctacaaggactccaagggcccggcatccgggagcacacacggtggggaaccgctgctcagcctgcacaaggccaccagcgaggtggctagtgactacaagaaaaagaagcatgtcttcaagctccagtgagccccccaatgggcaggagggagggatccaaggctcagcttcaactcccagtgggaccctggcttccctgggggacacttggtgggcaggtgggctgggccccttccccagatctctgaagtcctgtgtcccttcctgcaggacccaggatggcagtgagtttttgctccaggcaaaagatgaggtgagatctggtcctttcctccctctgtgtggacctcagtaatgacctggctgtctggctcctgacccagagtgatggggctgtgagaagggacactcacaggccagagttatcagggctgtaatgggaaagcccacaggcactgagagcccaaaggaggttcctaacccagtggggagtgggaagggcttcagggagggctgcctgcagatcctgatgacaaagtccaacatctttgccgtggtcactcaggtgagactggaatggagggagttcgctttaaaaaggggtgatttggccaggcgcggtggctcacgcttgtaatcccagtactttgggaggccaagacgggcagatcacctgaggtcaggagtttgagaccagcctggccaacatggtgaaaccccgtctctactaaaaaatacaaaaattaactgggcatggtggcaggtgccttaatcccagctacttgggaggcagaggcaggagaatcgtttgaacctggaaggcggaggttgcagtgagctgagatggagccattgcactcaagcctgggggacaacagcgagacttccttcgaaaataaaataaaaataaaaagggtgattcagagggacagtgggggtctaaaaaaaggagtgattcaggttgggcaccatggctcaggcctgtaatcccagcactttgggaggccaaggcaggagactgcttgagcccaggacttcaagatcagcctgggcaacacggaaagatcccatctctatgggtaataataataataaattagccgggagtggtggcacatgcctgtggtcccagctactcaggaggccgagtggaaggatcacctgaaccagggaggtcaaggctacaatgagctgtgattgtactatggcactccaggctgggtgacagagtgagattctgtctcaaaaacaagagggggtgggtgatctaggtagagggaactgcaagtgcagaggaccagaggtgcagtattgcaaagggttaactgctggagggcagagttcatggaagaaggtcccagaaaggttcccaggagataggtgtctcaggacaggatgggccatttggaggagattggattttttacctaagggcactggagagctaggggggattacagtgatgtgtaaaaaagattcctggctgggcgcagtggcttacgcctgtaatcccagcacttcgggaggccgaggcgggtggatcacctgaggtcaggagtttgaggccagcctgaccaacatggagaaaccccatctcttatggtgcatgcctgtaatcccagctactcgggaggctgaggcaggaggattgcttgaacccggaaggcagaggttgcagtgagctgagacagcgccattgcactccagcctgggtaacaagagcaaaactccatctcaaaaacaaaataaacaggccgggcatggtggctcacgcctgtaatcccagcattttgggaggccgaggcgggcagatcacaaggtcaggagatcgagaccatcctggctgacacggtgaaaccccgtctctactaaaaatacaaaaaaattagctgggcatggtggcgggcgcctgtagtcccagctacttgggaggctgaggcagaagaatggcttgaacccgggaggtggagcttgcagtgagctgagattgcgccactgcactccagcctgagcgacagagcgagactccatctcaaaacaaaacaaacaaacaaaacaaaacaaaacaaaacaaaacaaaaaaagattcctttggctacctgggtgggtagcccaggccgcggccagggcagggacccaagtgggagagcgcatggctgggccacacaggcctgtggggagaggaggaagaggagtctgagagaggcaagcataaaggtggtttgaagagatgttgagagtaataactaacacttgttatctcattcaatcttcacaagatgcaatgaagaagtgggctttttttttttttgagacagagtttctctcttgtcacccaggctggagtgccatggcgcaatctcagctcactgcaacctccacttcccgggttcaagcgactctcctgcctcagctacctgggtgactgggattacaggcttgcgccaccatgcccggctaatttatgtatttttagtagagacggggtttctccatgttggtcaggctggtctcaaactcctgacctcaggtgatccacccgcctcagcctcccaaagtgctgggattacaggcatgagccaccacacccggccagaagtaggcctttacccactacatgccttcttttacttatctgcacaatgaagattaaaaatagtttcttggcctggcatggtgcctcacacctgtaattccagcactttgggaggctgaggtgggcagatcatttgaggtcagaagttcaagaccagtgtggccaacgtggcgaaaccccatctctactaaaaatacaaaaagtagccaggcatggtggcacgtgcctgtagtcccagacactcaggagactgaggcacaagaatctcttgaacctgggagatggaggttgcagtgagctgacatcgagccattgcactccagcctgggggacagagcaagactctgtctcaaaaaaaaaaaaaaaaaagtctcttatcatagggttactgtgagaattaaattgctccatgtttaattgatacatgataaactgatacttagcacagggcctagtaaatatcagtgctctagtagtgcctgcccatattattatcattgtttgtgtcatttatctctgtagtaggaagtatatacaatcctattgcataggtttaagggaattaatccactaaagtgtttggaacagagcctggcacatattgctatgtaactgcatcatcatcatcatccctttttaatagatgagaaaactgaatttcagagagggtagtctgatctgaaattcacctattattccagcttctctcttccaaatacggcctctgtgccctgtttcttcccccaggaggagatgaacggctggctggaggctgtagcttcctcggtggcggaacacgcagagatcgcccgctggggccagacactacccactacttcatccacagatgagggcaaccctaagagggaaggcggagatcgcagggccagcgggcgcaggaagtgacttcccacccccaggacctgacacatctcgtctcccctcttttccgcactgtgggcacaaagacactttttcttccgcaggggcgggagcccctagttccaacactgaggacgcgtgacatggtgggcaccggaaaggaggggacttctcctgcaccccaagaagtggtggggagattgctgcccctatagccatatctcggccccttcccactcaccacccccaccccaggtgctgggggtcccttatttttatgcaataactgagcttgatgggggtgggcagggggccagttgagccaagcccccagccccgatctgcagatcctgccccaagaagctggggtggtgggggcagtaattcctgcccccctctctgccctagggatgggcacgggggcgctggtgaggtcccctggaccatccagggtgctagggggcagggaggggacaccccctccccgcctttacctcacttccaatgctgccttgatctctgtctgggaggggggagtgaaggggccctagccccctgcactccgccgcctcagagccatgcggttaattcctgacttagtttatttttgcaaaacgtcgatctcctcctcccccgccccgcatccgcgaaggcttttaatgggaggggcgtcaaagctcaaaactgttttcctctctcctcccccctccagttgtaaatgccacttcatgaggggaggggcgaggggaagcccacccctgcatgcttctggctggagcacctccctggggagtcgggggattgggttgtgggcagtccccatggccgcctggagaagccgctggggcccgggggtgtggggcggtgtggcgggcgcacactgtatgtacctataataaaccctttggctttgacggtctatggtcctttgtttgggttttctgggctgcgcccgggaggattgaaaggagggctgtggtggctgtaggggtgggtgcggggtggggagaggggcacgggggtaccgtggctgcggagaacatccagatgtacccttttatgtggacttaatttcggggtctaaacacacgccccttgacgagaacctagagggatggagaatatttcgttatgcttcgtaataaacttccccaaaggagactccgggtccgccccgtcaagttcaggaaaggcggacccctttaaggaggcggaaaagttaaccgcgatgggcaggcgctctgtccaatcgctagtgactcctggagtctctggcccaatgagcagcctatggaggcggggtccgggtgcacacccggaagtgggtgcgggccagccggctcgcccgggggccatggcagcagcggctactgcagccgagggggtccccagtcgggggcctcccggggaagtcattcatctgaatgtgggaggcaagaggtgagtgtgggagactcctgaggtcccatcctcgggggcgggaagcggggtgggagtatccgcctctcctgggggaatccctgtccatcaagggttgctccgccccccccccctttggaggcgcgagattctggaaaaacgccgggggagggggaaggggagggaaccctggatcctgcgggagggggacgcattcctcacccgctcctcttcatctcttgcgtccgtttaccttccccgcccagattcagtacctctcgccagactctcacctggatcccagactccttcttctccaggtgatcgggagagcgagtttggggcgagggtaggagggatggagagggcgtgggagacctaatatccactcccccggcccgtgacgcctgctcggtgtcccttccctgcagtcttctgagcggacgcatctcgacgctgaaagatgagaccggagcagtgagtcggacaagaactgaaatgggatgggggggaggggttggtaggaagaggggcaggaccccactcagtcctgccttttaccccatccatcctctgcccccctttcccgcagatcttcatcgacagggaccctacagtcttcgcccccatcctcaacttcctgcgcaccaaagagttggatcccaggttggcatggaaaaaggggagggagtccctcactgtcttcagtccctgaggagttctttcacctcctctgaatgtccacgtgagctccattctattagaattctcattcagaaccttgatcacaggccgggcgcgccgggattgctcacgcctgtaatcccaacactttgggaggccgaggtgggaggatcacttgagcccaggatttggagactagcctgggcaacatagcgagaccccttctctaaaaaagcaaacaggcaaaacttcatgagaatcttgatcatgttaaaattttatgtccttcgatttctccctacacacacacacacacacacacacacacacacacacacacacactcaacatttcctccacccatatcatcactccttagcatctttattccatcaaaactttctaccccttgacattctctgtgcagttttgaaaattaccctctcagcattctctgttcacccccacacctagaccctgacctctagtcaattctactacccaggggtgtccacggttccagcctcctccatgaagcccagttctatgggctcactcctctgggtaagtgggagcccccagctatcatcctcattgtatagaaaaccaactctgtgatgctacctgcccctcttccccttctctcctgaaagagggctggggtagaggtgggaggactggttatggccctggccgggtctgtattcgtactgggaggagtattggtactctgtgtagaaagaaatggggagggggaaatggggtggcctcagcatctccctaagtcccagcctttaagtcctcctgttgcagttcgtcgcctgcagcttcgagaggagttggatcgatcttcttgtggaaacgtcctcttcaatggttacctgccgccaccaggtaggcactcccaatggaatggaggggcgcggaggtgggccaaagactacatttcccataaggctgcagctctcgggtgcctgtgctgtgcgtcctgagatacagtgggaggtgtagttccctatcagatgcttgggctgatgcttggaaaggaagttggacacagcatttcccatgagacaatgggccagctaactcttgaggctcagaaggatgtcctggagccccatgggagttgtagtccgggtttggtttctttgtagggggggctttggaagacctgggattcttcgtatggaggggagaaatattaataggaagttattgacagtaatgcccatgatagccagcccactggccatggaaggtatgccccagtggttattggaactaggcttttctgattggtagaagtaacagagtagggaaatttcatctacagctttatttccctaactgcagtcagcacctgctaccttcatgaaagttgccagatataaagatctgtagtagtacttttccaacttagttttatcctgttttccgaaaaacaatcatttatttatttatttatttatttaattttatgagacagggtctggctttgtcacccaggctggagtgcagtggtgcgatcttggctcactgcaacctctgcctctcagattcaagccatccttccacctcagctctgccactgagtagctgagactacaagcactcgccaccatgcccggctaattaaaaaaataataatcattttaaatgcaagctttatattataaatacaaagtaaacatgaaaataaaacccaaacatagcagtgttattaaactctggcctgtagcagtggctcacacctgtaatcctagcagtttggaggccgagacaggtggattacttgagacctggagtttgagaccagcccaggtgacacagcaagacctcatctctactaaaaataaaaaaaaattagccaggtgtggtggtatgcacctgtggtcccagctacttaggatgctggagtgcgaggatcgcttgagcccaggaggtcaaggctgcagtgaactatgatcactcattacaccccagcctgggtgacagagcgagatgctgtctcaaaacaaaacaaaacgaaaaacaactctggctagatgctattgcttgccaagggtgcagtcttccatttattaaaagtgaaaattagggccaggcacattggctcatgcctgtaatcccagcactttgggaggctgaggtgggtggatcacctgaggtcaggagttcgagaccagcctggccaacatggtgaaaccttatctctgccaaaaatataaaagattagccatgtgtcgtggtgggtgcttgtaatctcagctacttgggaggctgaggcaggagaatcacttgaacccaggaggcagaggttgcagtgagccaagattgtgccattgcactccagcctgtgcaacgagcgaaactccaactcaaaaaaaaaaaaaaaaaaaaaaacggaaaattaggtaatactgcagattcattaatatcacagcagcactaaactcagtcttcctctgtgctgggctcaagggaactgaaagggaagtaacttgctatgtggttcagtgtcatttcatgctgtgtcactgcaccacttaaaatcttcacccggagactatgtcccacacatggggaaatcaatcaccgtcatattttaagtgcttgctgtgtgacagccacgattacaatgactgttactctacctcttattctcactgtagtgttcccagtgaagcggcggaaccggcacagcctagtggggcctcagcagctaggaggacggccagcccctgtccgacggagcaacacgatgccccccaaccttggcaatgcagggctgctgggccgaatgctggatgagaaaacccctccctcaccctcaggtacgtttctatctcgtggaaggttggggcagctgtggggtccctgtgaccctcttctgatccctactcttcccctcaaggacaacctgaggagccggggatggtgcgcctggtgtgtggacaccataattggatcgctgtggcctatacccagtttctagtctgctacaggtgcttggggagggagtggcaggaggtcccagccctgttgatgggaagggcatgcggtgagggttggtgatgtcccctcgatcctacaggttgaaggaagcctctggctggcagctggtgttttccagcccccgcctggactggcccatcgaacgactggcgctcacagcccgggtgcatggtggggctttgggtgaacatgacaagatggtggcagcagccaccggcagcgagatcctgctatgggctctgcaggcggaaggcggtggctccgagataggtatgaccccaagccttttccagaaccctctgtcctttaaattctactgcctgttaaaatgacccaccccataaaatcctcaaacccataagaattctctgctctattagatctgtttgtgtcattagaatgctccagcccttcagaattctgtatcctgttagaattccctggcttcctagaaaaatccacccacatacaattctccctccatcagaattccctgccctgttagatctcttggttttgttagaatgcgctattctgtgtggccatgagaaatgtctgacttggcccggtgcggtggctcatgcttgtaatcccagcactttgggaggctgaggcgggcagatcacttgaggtcaggagttcgagacccccttggccaacagggtgaaacccagtctttatttcaaaaatacaaaaaaattagctgggtgtggtggcacgtgcctgtaatcccagctactcaggaggttaaggcaggagaatcactggaacctgggaggcagatgttgcagtgagctgagatcgcaccactgcattccagcctgagcgacagagtggacagagtgagacaccatctcaaaaaaaaaaaaaaaacaaaaaaagaaatctctgacttatggctgggcacagtaactcacatctgtagttccagcactttgggaggccatggcaggaggattgcttgaggccaggagttcgaggctgccgtgagctatgtaagccatgattgcaccactgcactccagcctggacaacagagcaagaccctgtctcaaagccacagcaacaaatctcggacttattaatctgtccccaaataaatctcagccctcgtaagaatcccctgccaccagtggaggtttttttgccttattgcaaatctcagtgctgttagaattccagaccgttttagaatcccataccccatcagaaatcttctggcccattttatcttctctaattcctgctggaatcttcactttttttttttttgaaatggagtcattctctgttgcccagattggagtacagtggtatgatctcggctcactgcaacctctgcctcctggggtcacgcaattctccttcctcaacctcccaagtagctggggctacagttgtgtgctaccacactcagctaatttttatattttttagtagagatggagtttcatcatgttggccaggctggtctcaaactcctggcctcaaatgatccgcccacctgagcctctcaaagtgttgggattacaggtgtgagccactgtgcccagcccctgatggaatcttctatccttcaaggattctgtggtcccactgaaccctctggtccttggagttcttcctcccacctctcctcctccatgaggcagggttccagctgagccctttttgcccactgcaggggtctttcatctgggggtgcctgtggaggccttgttcttcgtcgggaaccagctcattgctacaagccacacagggcgcatcggggtgtggaatgccgtcaccaagcactggcaggtcagagttctggccagcctggctgcccccttcccagttttccagactgtacagacccaggaaggggttcacgtctgcccccacccccaccccctaagcctggaggaagccagagaaccagcagctggccagagcctggggatgtctgtgataaaggcctaaggagcaccagggaagccttcctggaggaggtgctgcagagcccacatgaagcatgaatgggtttgaaaaggagtagggaggattgtcttgggactgggtgagagagcaggttaggggggatgctgtagaagacaagaactggcttggctcggtggctcacacttgtaatcccagcactttgggaggctgaggtgggaggatggctttgggagaaagacagacagaggcagagaaagagacagagaggcagaaaaccaggcaaatagaaatagaaaatcagaaagaggtgacagagaagggtagacagagtcaaaccagactgaaccactgtggcagatgggggaactcagagagataaatggagatgaattagagtcatgtcagaagtacatagtggaggccgggtgcagtgactcccgcccgtaatcccagcactttgggaggccgaggcaagaggatggcttgagcccaggagtttgacgccagcctgggaaacataataagactctgtctctacaaaaaatttaaaaaattaaaactttaaaaagtacagagtccaggagaggccaagagtcagacagacagatgcatcaaagggaggaagggagggaacaagacagggacaaaggcaggcctggggtggacggggctggggagcagtgggtgggttctggaggtggaggagagggcccatcctctgtgaggggtcaccacggaaggaaaggaatggaagggctcccggctgcagcctgtcctgccccacccccaggtccaggaggtgcagcccatcaccagttatgacgcggcaggctccttcctcctcctgggctgcaacaacggctccatttactacgtgggtgagcagcagcctgtgtcccgggtgcccgagaccctcccctgggagaggggaagggagggagagaggctggggcacttggaacaaacccgctccaccctccctgcccaccccagatgtgcagaagttccccttgcgcatgaaagacaacgacctccttgtcagcgagctctatcgggacccagcggaggatggggtcaccgccctcagtgtctacctcacccccaagaccagtaagctatgacccggcttcccctgctgctgtcacctgccagccccagccccagcctgcagctgtcccccaacttgtgtagcatgacccagaggggtttatcgaggggcggcagattcaactctctctcatttttttttctgagacagactctcattctgttgcccaggctggagtgcagtggtgcaatcttggctcactgcaacctccacctcctgagttcaagcgattctcctgcctcagcctcccaagtagctaggattacaggcgcccactgccacgcctggctaatttttgtagttttagtagagatggggtttcaccatgttggccaggctggtcttgaactcctgacctcagatgatcctcccgcctcagccccccaaagtactgggattacagacgtgagccaccgcgcccagccagattcaactctcatccagtcattcaacaaatatttactgagtatccctgtatataagcacgttctaggtgctagatggtggccaccctctccactaggggcagaatggaccattaggagttaatctttgtgtttctttcccacctttgtgattaaggcatgatgttcacatgttcataaaacaacacagatgcaggttttacagcagatgaacctgagttctcttacttgagacagttttttgttttgttttcttgacatcaaatgcagaatgggttaatttttgagacgtaattctcataccataaaatttcccatttgaacgtgcacaattcagcggattttagtatattcacaaggttgtacaactatcaccatgaacaaattccagagtatgttcatcacccccgtaagaaaccccctgatctttagcagtaactccacatttctcacttctgataccctctagaaatcactaatatgctttctctttttgtttgagacaaggtctcgctctgctgcccaggctggagtgcagtggcatgatctcagctcactgcaatctctgcctcttgggttcaagcgattctcatgcctcagcttcctgagtaggggaggattacaggtgtgcatcaccatgcctggctaatttttctactttaagtagagactgggttacgccacgttggccaggctcaatatgcttcctatacctatggatttgcctgttctggacaattcctgtaaatgggatcatacattatatggtcttttgtgtctgcatttttcacttagcatatttttttaaatggttagtgttttctgggtcttaagatatccttacctattctaggttacaaagatcttctcctgaatttcttctagaagatttacagtttagtttttacatggaagtctgttctatcagaaattaaattttatgtatggtgtgaagcagggattattcttttttaaaaaaaaatagagacagggtcttgctctgttgcccaggctagagtgcagtggcatgatgtgagttctctgccacctccgccactcgggctcaagcgattcttctacctcaacctcctgaacagcagaaccacaggcatgcatcaccacacctgtctaatttttgtatttttttgtagagacagggttttgccatgttgcccaggctactcttgaactcctgggctcaagtgatcctcacactttggcctccaaagtgctggaaatacagacttgagtcactgtgcttggccatagctgctgctgctgcttttcttttttttttaaagcagaaataagttaataatacacctaacttcatgacacattatcacctttcttctttgtaaggcccttttcttatttcttttttttctttctttctttttttttttttttgtcttttcctgagacagagtatcgctctgtcattcaacccaggctggagtgcaatggcgcaatctcagctcactacaacctctgcctcctgggttcaagcaattctccagactcagcctcccaagtagctgggattacgggtgcctgccaccatgcccagctaatttttgtgtttttagtagaggcagggttttgccacgttggctaagcaagttttgaactcctgggattctcctctcgtcgtctcccaaagtgctggaattacaggcatgggctgctgcacccggcctctttcttatttcacttacttactcatttcctcctcatctcccttcccgccacatgccactattatgtcatttttctttgttttttgagacagtctcgcttcgtcacctaggctggagtgcagtggcgcaatcatagctcactgcagcctcaccccctgggctcaagtgatcctcctacttcagcctcttgagtagctgggatcataggtgaatgccatcacacccaactagttttttaaaaatcttttgtagagatgagggtctcactatgttgcccaggctggcctcaaacgcctggcctcaagcaatcttcctgcctcggcctctgttctctgttttactttctctttcctctcttatttgctgtttcactgttacaatttctgtctctgggcctctcctcctttgacctgtgcctttgtctccctgttcctccatttcccacatctcatcaccatctttttgtgtccttccctctctccttgctttctgactgtgtctctgttctgtgtctctttctttctttctttctttttttttttttgagacagagtcacattctgtcatgcaggctggagtgcagtggcgtggtcttggctcattgcaacctctgcctcctgggttcaagcaattctcatgcctcagccttctgagtagctgggattacaggtgcgtactaccaccaccagctaatttttgtatttttactagagacagggtttcagcacgttggccaggctggtcttgaacgcctgacctcaagcgatccacccgcctcagcttcccaaagtgatgggattacggcgtgagccaccgtgcccggcctctccttgctttctgactgtgtctctgttctgtgcctgtttctttctccctgccctggtttctgtctctgtggcccaggccctctcctcatccttggcccctcaccaggtgacagtgggaactggatcgagatcgcctatggcaccagctcagggggcgtgcgggtcatcgtgcagcacccggagactgtgggctcggggcctcagctcttccagaccttcactgtgcaccgcagccctgtcaccaagatcatgctgtcggagaagcacctcatctcaggtgagcctctgtggggtgctccagtgctgggagagacagctcagatgggagtgtggagacaggaggatgagaatttccactggggagggacattgtgtaggaagagagctctggcggagaggattgacctgggatgggactgtaattgcagaagtgagagaataccataggggatcagtctggggaagagtgaatctgtgtgtgtttgggaatccatcaattcagcaacgatttacggggcacccaccatgtgccaggcataggggatacagtgatgaacaagacaggccaagtccctgccctcgtggagctgacattctagcagcgatggcagacaataaatctataaaaatggacatcaatggccagctgcggtggctcacacctataatcccagaactttgggaggccaaggcgggtagattacttgaggtcaggagttcgagaccagcctggccaacatggtgaaaccccacctctaccaaaaatataaaaaattagccaggtgtggtggcacgtgcctgtaatccccgctactcgggaggccgagggaggagaattgcttgaacctgggaggcggagattgcagagagcccagatcatgctactgcactccagcctaggcaacagagcgagactccatctcaaaaataaatagataaaaatgcaaatcaggctgggcactgtggctcatgcctataatcccagcactttgggaggccaaggtgggaggattgcttgaggctaggagtgtgagaccaacctggacaacaaagtgagacattgtttctacaaaaaatttttaaaaaattagccaagtatggtggcatgcacctggggtcccagcttcttgggaggctgaggtggagggatcacttgagcccaagagtcaggggctgcaatcagctatgattgcacccctgcactccagcccaggcaacaaagcaagactctatctcataaaatattaataaaataatctaaatcaacaccaggcaatgataagggctatgaataaacatgaagctgtgtgtggctagagagtgtcaagtcgctggagaggggtcattcagggaaggcctgaggaaggacctttgagcagaaataacagaatgagcagtgcagattggtagggacaagcattcaggccgagggaacaggcattgcaaaggctctgaggtgagaggatgcctgaggaagtgcagggagccacttgtgcctggaacagagtaaatgagggggagaatgggaggagatgagggtatggaggtgacaagggcaggagccacagagggctccgagcaggggagggacatgactagcttcaggtgttcacaggctccacctggctgcccgtgggagcacactactgggataggacaggagcagggacctctgggaggggcgtgctgatacggtccaggcaggtgacgaaatggaccaggaccggtgtggggcagaggatagggcaaggtgagatcaggctctggaacagttttggaggcagaggcaacagggtttttaacatttggaattctggggaggaaaggattctctgaaagggaagaactcagcaagggctgaccctcctgaaacggggctgtcctgaggctctggacgggcaggcagcattgatgcctgcaccaggcctgacttcctgctctccttgtgcccctcagtctgtgccgacaacaaccacgtgcggacatggtctgtgactcgcttccgcggcatgatttccacccagcccggctccaccccactcgcttcctttaagatcctggctctggagtcggcagatgggcatggcggctgcagtgctggcaatgacattggtgcctactggctcctggccttcccaccccactgacccccttacctgacccctgttgacctccgctgattcccacttgcggccacctgacccaggagcctgcaacgattggggtgtcctgatccttgaggcacctgagctccactgactgccacaaccccccagccctctctggccctgcccaactctaacaacctggggatgggactggggtcttggggtggtgggtttcatcagtggggaaggaagtctgaggctgagggaatcccagctggccctgacccctgcccctgcctggcccaggcccctacggtgagcgggacgaccagcaagtgttcatccagaaggtggtgcccagtgccagccagctcttcgtgcgtctctcatctactgggcagcggtgaggacagtcctgtccaacagggagggaggacagtcctgtccaacagggagggaggtcaggggagaaggcaagatgctagccagatcactgaggccagaaaggggtcccagccaaggagcattgaaggagcaaaggctgggagggaggacaggcctggtaggtttgtcttctggtatcaaaggtgtgacaggtgttggtgggactgacctggcgcagtgccagcccagtgcaggcagggccaggttgaaggcacagggggtggggtcagggtgggatggggggcccaggcggagggggaggggtgggatgggggcccagggggagaggtcggggtgggatggggggaccagggggaggggttggggtgggatagggggaccaggggcaggggtcgggatgggatggaggagacccagggagctgtaggagccttgcttcagctgggaaaggggcctcggaggatgttctggatgaagggactctgagcagagacctagaggacaagtaggaaggagcagaagaaagaaggcaggggaagggggccccagcctgagggaactgtatgtgcagaggctgagaagggccaaatagggtcacatgggaaggacacgtgggctcctgggctggagcacagaacaggaggtgaggatggggtgcagatgcgggcgggccttgtcaggctgtggaagggctgaggctttgtcctgtgcggggagccgtggccactgcatgggggatgaaaggaggcttgatgggaggccaggagcccagggaggaggccaggaggctgataggaggtgggggagcagctgggacgggcctcaggtcttccctgcagtgggagcagggaagagcagaagctctgggagactccctgggtgtttggggctgcggtgtccaagagctgctggacccttgggactggaactcaaaagcaggctagggatggataaagattgggatggcccctggagaggcaggaactgcagccacagtggtggggactgggacgaggaagggtgagaaagcgagggtgaccacctcccccactgcaccccccagggtgtgctccgtgcgctccgtggacggctcacccacgacagccttcacagtgctggagtgcgagggctcccggcggctcggctctcggccccggcgctacctgctcactggccaggccaacggcagcttggccatgtgggacctaaccaccgccatggacggcctcggccaggcccctggtactccctgccccaccccaatcccgtcccaagccccacagcctcacccagaaccactctccactgccaactgcttgatctctctcccaggcccttgccctctgaccccttttcctttgaccccctctctgctccccatcccttcctgcccttgtttttcaacccctgtctcagcctctggcccccatgcattgatctctgcttcctctctcctgtcctgaccctcggtgcttgcactgcaatgcaacccaggcccttgccctatgacccctgtcttgccccctgaccctgcttccgtgccccccagcaggtggcctgacggagcaagagctgatggaacagctggaacactgtgagctggccccgccggctccttcagctccctcatggggctgtctccccagcccctcaccccgcatctccctcaccaggtagccacaactccactgccccttctgtgcaatgaggggagaggggacagcatggtgttcccggggacagagtggcccagctgccccgtgatgacgtgcacttactgtccttacttcctcagcctccactcagcctccagcaacacctccttgtctggccaccgtgggagcccaagccccccgcaggctgaggcccggcgccgtggtgggggcagctttgtggaacgctgccaggaactggtgcggagtgggccagacctccgacggccacccacaccagccccgtggccctccagcggtctcggcactcccctcacacctcccaagatgaagctcaatgaaacttccttttgaacaacgcagctgccatgatgccttgggatgccctggtcctgggggactcaggtgcctccctgattcctgtgggaaccccgggttcagggccagggcctccttggaataaatggttattgttactaggtccccaccttccctcttttctggaagccaaagtcaccctccccaataaagtcctcactgccaacatcttgcttattcttagcaggtttgggactccccaggaaaggggtggggaagatgtgggacccaacccgatatatgcaaaatcaggaacatctacctctcttgtttaagcaaagggaggccaggcatggtggctcacatctataatcctggcactttgggaggccagtttgcttgtgctcagaagtttcagactagcctgggcaacataacaaaaccccatctctacaaaaaaatacaaaaattaagcaggcatggtggtgcatgcctgtggtcccagcttcttgggaggctgaggtgggaggatcgcttgagcctaggaggccaaggctacagtgagccatgatcacaccactgcactccagcctgagtgacagagtgagatcctgtctcaaaaacaaaacaaaacaaaaaaggtgttgcaggggaggaatgtgttggcttttactctgccttcaggcatggctggatccggggcttcaaacactaattcagaatatctttttttcttttttcttttcttttttaaagtctcactctgtcatccaggctggagtgtagtggtatgatctcagctcactgcaacctccacctcccgggttcaagcaatcgcaatcctcctgcatcagcctcccgagtagctgggattacaggtgtgcaccaccatgcccagctaatttttttatttttagtagagacagagtttcaccatattggccaggctggtctcgaactcctgacctcaggtgatctgcccacctcagcctcccaaagtgctgggattacaggcgagagccactgtgtccggcccagaatatctttttatctcctaacttcacttacctctggaatacatcttcaatcaggttttctctctgtggcaaggtgactctaagcagctgcttagcaactctttcttccctagcaacagcaaaaatcacaagactgattttcattggcttgaattaagtcaggtggccattcctgaaccaattactgtggccagtgtgatgaaggccttccattattgcagcctggatcatgtgtcctgctgtatttttagtagaggcagggtttcaccatgttggccaggctggtctcaaactcctgacctcagatgatccacctaactcggcctcccagagtgctgggattacaggcgtgagccacctttcctggctggccttgggattttttttccccaaataatgcccgttcctacggcacttccttgaggagattttctgcatcttttttccttgtgccaataaaaaagggacagaaagtggggacagactaggagtagagaatactagaacatgctaattctagaattccatagtttctggaatgccagagcttctgaaacatagtagagaggggtctcgaacattaggacatctcggacacaaggatattctggagtgctcatggattaacaatattagagttctcccctgcttatcagagaatccagaatatagaagtttctgacaaaaaggacctgaaaaatcactgattctagaataggggagtgtcaaggggagttcatacccatgaatctccaccggtaggaatatcttgcatgccaggatgtctggaatgctgagaattataggatacagaaaggaacctggattactaggaaatctagagaatgggagagatcctggactatccgcccttccagagcactggaaggtttgtttgcgttccaagaaatccataatggcaggagattccggattatcagagaatctggaacacaaatgggagacgtaaaaggtgagtgcctctgaaaccggggtgttctgaaatagctgtgcacctcaaaccctaattttgtttttgtttgtttgtttttgagacagggtcttgctttgttgcccgggctagggtgcagtggtgcaatcatggctcactgcagcctcggccttctgggctcaagtgatcctcctgcctcagcctcctgagtatttgggactacaggtgtgtgccaccacagccagctactttttaagtttttttgtagagacattgtctcactatgttgcccaggctggtctcaaactcctgggctcaagccattctcctgccttagcctcccaaagtgctgggattacaggtgtgagctaccatgcccagcctcacactctagaaaattttttacatgccaggatattcagaatattgggggatattggcatgttaggaaatctagtatgtagggggagggcctggaaggtcaggaaatctagaatatggtggtgttttgtaatgctcacagatctagaatattagagtcatttttttttccaggccggagaatccagaacgctcgtgttgctgaaatgctggtcattctattcttatttcatgtttaaatttttattattttctttatttcttttttttgagacagggtctttctctgttgcccgggttggagtgcagtggtgtgatctcagctcacctcaacctctgcctcccgggttcaagtgatcctcccaccttagcctcttgagtagccgggattacaggcgtgcgccaccatgcctggataatttttgtattcttagtagagacagggtttcactgtgttggccaggctggcctgaaactcctgacctcaagtgatctgccctcccacctcggcctcccaaagtgctgggattacagacgtgagccggccttattctgggggagggggtggggggggagagagagagagggagagagagaggagaatttgggatgttagcaaatctagaacactgaagagctgggttttttaaatgctagagatagtattatcctagtatagtattaactctgtgtgtttttgtgcgtgagagggcatggggggaggggtggaagattctggaatgcggggggactagaactctgagggattctgaagggttgagatgagttaggattcaagaggtgacatagacacgatcctgggagatagtgacactgatgggagggatggggagctggggactccaaattctagggggaggggaggctaacgccggaagttgcagtggtgagccagaggatgttgcctagcaacaagcattgaagatgcgctggatcccggacagaagggagaaatttcagcagcgcccccagcaaatgctccagccacagggtaggaggtggtgaggggggaagcgggtagggatatgctgtcctgcagggtcatgtgagcaggggtcttgggggttatacaaaaacagggtcatggagtacagtcatggggcagagccgggctctgggacagcccacgaatagctgtgaatggagtgtgagtgccgtcgtcacctgccccagggactgtgtgtccctggacggtgctggacccagatttctgggtgtcagtgtgggatggaggcatggattgctgtaggtggcagtaatggtgtgtagccgtgtgagtcagcctgtgtgtctcacagtgagcgggggtgaagggcttccccgtcagtcctgcacaccctcctggattggaagaaggagcaggagtggggggtggggggtgcaactggatcagttgccattcttggtctggggtgggctctgtggtcacggcgtgtggcctagtaccctgtgtgggtggagcctgggatccacgaggtgggggcggggctaacgctacagaactgggaagcttaagaatccaactgctttgggatatggggcctggaaccccaaagcgaagcaaacatgaaaggggtgggcttgggatcctacatgtggtcacgtcccagttttctgtgggaaagggtgtggcctgaaactctggaaaaagaggtgattaggggcagagtgaagctctgagggtggtgccttagggagagaaggggcttgtatttcagagaatatagggtggagccttgaatttataatgatcttctcaaagaattgatcccttctcaaggccctaggcttcaggggttccaggctcaccatctgcaaaagcttgctccccgaagctctgtccctcagtgaacccagccaggctctgcccctgacccacaggatctgctcccagggggtcctgggggctcctggctctgccccctcctgcacctcacttattgccatccccagagggtatcagacccccttccttgcctgagtctttgaatgctcccaagagctttgagtctcaagctgggcttgagaccctgagtttgaaggcttgaagcctggaaccccggtgtggacggggtttaagggcccctgtggcttgcagctcctagtggtggagactcttaggcaaggaagggatcggtactctcttttatatagttttatgtatttatttattattgagatagggtctcactctatcgtccaggctggagtgcagtgcagtgcagtggtgccatctcaactcactgcagcctccacttaccaggctcaagtgatcctcctacctcatcctcccgagtagctgggactactggctcatgccaccatacccggctaatttttggatttttttttttttttttttttttttttttttttgagacagagtcttgctctgtcgcccaggctagagtgcagtggtgtgatcttggctcactgcaacctccacctcctgggttcaaacgattctcctgcctcagcctcccgagtcgctgggattacaggcgcccaccactgcacccagctaatttttgtattttttagtagagatggggtttcaccatcttggccaggctggtctcgaactcctgacctcatgatccacccgcctcggcctcccaaagtgctgggattacaggcatgagccaccgcgcccggcctaatttttggatttttaatagagatggggtcctatgttgtactatgttgctcaggctcacctcaaactcctggactcaagcgatccacctcggccttccaaagtgctgggattacaggcccgcgccagggcacctagccggaactgggaactctctaaggagaaagtctgcaattctgggtggtgggaggctgctcttgggagcattcaaagactcaggcaaggaagggggtctgataccctctgggggcggcgataagtggggtgcaggagggggcagagccaggagcaccctgggagcagagtttgtggatcaggggcagagcctggctgggttcactgagggacagagcttcggggagcaagcttttgcagatggtgagcctggaatccctgaagcccagggtcttgagaagagatcaattctttgagaagatccaatgtgaacttgggaccctcagaggggcaggacctgggggctggtgcagggttggtgctccatttgcagaatcctcagtctctctcgtggaaaggggtacccgtggggggcttccagcttctacgccagcgagggagctaaattctgaccgaattctcccagaactgggagcagagagctgaggactgccagatggagtccagcttaggggaccctgcccccaaccccgctcccgtatccctcccatttttaagcacccctacgcctgggacctctgttccacgagaaggttcacggagccagtatccgagtcctaatttccccccaccgcgtggggaactcgaggtcccccgcgcccctagtccggcacctgtccctgctgcctcctgattggccgcgcggcgagcgctggcggcgccgggctgtgattggcgggaagttcgcagcccgtggctggactgtggagaaagtgagtcggcctcgggcgggggcgggggcgggggcaggggcggggccggggctagcctgacccgctggacagaccgcccgcccggagcgggactcggcgcccgacacgatgccgaggcctggcaccagcggccgccgccccctcctgctggtgctgttgctgccgctcttcgcagccgccacctccgccgccagccccagccccagccccagccaggtcgtcgaggtcccgggggtccccagccgcccggccaggtaagccccctgcttccttgtgccccttccacccaataagtctggtggtccaggaggaccacggctttcggattcaggggaaactcgaacccactgcttcgatgtggagatgcaaagagggcccttggatttattaggcgccctcaatttgtaggggttagattcggggagtactgagatttttaggggaaagagtcccctttattgtggtggagaaggctaagtctccagagaatcctggggttagttcggggaaaggtctctagtttattggggcagggggtggggggctgagctctcctagaatgatagagacgtgtggggtcttcgagctaggatggagcgccccaagtttcttgggcgcgtaaggaggaaaggtgttgggggattctggagggactttatgaggccgctgagttgtcctggttttctaggatttgggggctctgtgttcatgaaaagcgacctttgggtttttcgaattggtcaggaagacatagactcttgcgttgatggtggaggggcttgtggggagtggggtcgggtgggggagtcctcaggcttcagaacggttggggatgctcaagtttcctagaattagaggactctgggattgaatgaggctccagtgatttcaccgcgagagatccaggattccctatagatctgggggctataggcgcccttcctgtctgcgggtgacgggactgaaggaagccgtctgcccagcacccccacccaccctccccgcctggcggcccagcgctccgttacaaaggccccgggctcctctcccgcctgggtctctgcgaatgcgtttagtaacccgagccgcggcgggggcggggccgggaaggggttaacctggagaaaaggcgggagggatgacggcaagatcggggatccccgaggctccccaccagatggcctcatcctccactcggccccacccacctgagaggggcccacgcgctggacacccccctctctgcacccccccactgctctcctctcggggtctgggcgcgcgccctcgtctctagacccccttagcctggggataatggacttgtctggggggccccttcattgcgacgcacttgaaccggagctggaagctccgccactgagaccctctgggctgggagatgtctgcaagaacggcacctttctcctggtcaggcgggaaactgaggcccaaagaccaagaaacgctggcttctggacacacatcgtggaagggcaagaacgggctagaactcaggctctgggattctcagtcctggactgtgactcccgttatccccctccacctcagcaccctgctggacccacagtcagagggaagagccttccctccccagctgccgaggcctgtgaaaatggcgccacctgtcggccaggctcaggatggcgtctgagtcccggaccgggatgtgcgggagggcggggttctagattcccagacagtgcgggcttagaaatgctcttagaaatcgagtcttttgtttttgtttttgttttttaatcacttttaaaaggctttaaaataacgtattttttcaataaaatcgtacgccaaaatctcttcataagacaaaagtacggtttctgtgcccttcagcccgaagtctaagccaatttgcctcccattgtacagatggagaaactgaggcgtggggagaagaacctcgttagtcatatacctgtttcaagccccctcaggatgcgtcttggtttcccctccccgattgccctcctttgcagagttctggggtgctaggggcctgagtgacttccactccactatttatagcgttgctgtttgtcgctgctgcccgggccagacgtctaggaggagccgctgcatccgaggtgggttctggaagatggagtatgagtagggggcaaaagggaataggaggagaggggcagggagctccccatccctcccctcatcccagtgggagagctggatgcatttggtagagaagtacttggtcccctccttccccacttagtccctggctgtctccgaagccttctgcagggtccgaagctgccagcccaaaaagtgtgcaggcccccagcggtgcctgaacccagtgcctgcagtgcccagtcccagccccagcgtgaggaagagacaggtgtccctcaactggcagccactgacgtgagtgggcagtccctcccctaccaaatcctccctcaggaactcctagctttgcccccgtttccgctcctcctcccttcccctctccctctctctcccccctccctccccggctctttcttttgctatcagcctgtctgtccgtttctatttcatcccttgcctgcctatctcaggctcttcccatctctgcattatttctgtctctttctgtttctttctagttacctgtctcttttcctctctctctttctccctgtgtctcactgcctgcctctatgtctaagtctctctgccccttctctctttctctcccccaacccccatcatctctctttctctcagggtctttgtttctctcccactagaggcctggtccccataaataggtgttgtggggggagggttgggcagagccgctactgaaagacattttcctggcatggaggccctttggtggggaggtcagtttaacccggtgacagcagcttttccgtcctctcccacccaggctccaggaggccagagctctactgaagcggcggcggccccgggggccagggggccggggactactgagaaggaggcccccacagcgtgcccccgctggcaaggccccgggtaagcacatccgcctttcctccgcctggggcgaggggggttccgggccagataaagccgtctggttcccacggtccagccgccgcctacccgccccccgttgtagctcagcacccacccccaggacgaggccccctctagggaccccagcgtccggccgtgcgaggtgagcccgggacaggaccagacacaggccagaggcactgacccgcgggggtggggccgggaagccaggcgtccgggctccccgcggccgaagagggagggcgctggcccgttagaaagctccgccgaaccagcccagacaacaaaagcgattgtgcgggttggcgcctgcctgggcaccaaatgctcaagattgtggggcggctgggggccaaaggcctcctcctgtttcccgaatcttccccctgccctcctcccgctccagctcttgacccctagtctagaacacccctcatctcaaacaccctcaaaaccctcctcttgctgtagccttcagcccagatgtgacccctccccctaaagtcttccagatgtgagcctcgggccagatgttagtacccccgcccacagcctccctttatccattgtgacttctcccgccaggtgtggcgttctggccagatgtggctacatcttcacatgtatcccccccacctccagcctcctgcccaggatctagacgcccaattcctttatgtgcccaggtgtagcgacccttctcccatccctcagatgtcccacctggctgtccagatgtaccatgatagccccctatcaagatgaagcccctttctctgtgccccgggcagaagaggatcaactcttagctgtctccccaaatgtggcccccactactcttaatggatttcctctttatggattcagctctgtctggggggaaacccgcccgcccccacctgttcccttccccgccgctcccctacaggcccggtccacttgttggtgcgcggatggggacagagggggcgccccgctcacccctgcgagtctagcgcccagcctgcgagcctctggctaagcgcccagccccacgcgcccccgcgcggccgccggggagggagtggtgaggagggggggcctgagcgggggcgcgggcgacctcccccgcgggcgggcgggcgggtgcggccgggcccctcgggcgggctggggcggcggcgcggcggagcgcggcgctgcagccatggcgggcggcgtgcggctgctctgggtgtcgctattggtgctgctggcgcagctagggccgcagcctggactgggccggctcggagagcgtctccgcgtgcgcttcaccccggtcgtgtgcggcctgcgctgcgtccatgggccgaccggctcccgctgtaccccgacctgcgcgccccgcaacgccaccagcgtggacagcggcgctcccggcggggcggccccggggggacccggcttccgcgcctgtgagtgcggggtggtggtcccgagagagcggctccgggggggaggaggatccctggggatggaggagacagtcctccagggagagggagcccagattccatatgcaatagtgcaagggaatatcaggggctatttgaggaagggggccccaaattcctggcttttggggttgggtcctgagggttccgattttgcaagcaatgagggttcttagaggcctgtgatgtcccacgtgagggaattggcgccagctttcatgctttgcgtcaaaatggggatctcagaattgaggggcctgagaacttttgggaggggggctcgaattctgagacgctgagtaaggagtccccggggaccaagcaagagtctcaggaccgcatgggggacgtctcagtttctgtgtgtttgggtgggaaggttctgtatgggaatgcctgtgaggtggggtactagagagaagaaagttaatccgaagaactaagagggagaggggacagagacgggggttgtgtgtgtgtgtgtgtgtgtgtgtgtgtgtgtgtgtggcggcgggggtggggtgggggtgtctccgcaggacctgagttgcaggggtcccacgtgcgacagaaatccagataagagggcttacggaaggggcgccccctgggggcggaggggacaggaggtgtatgcaccaggcactcctagagatggggagccttgggggttcaggtgaggtgggggagggcgcaccacctgttgttccaggatgcaaaagtgggcagactctctgggatcgggccttcctgccccctaccccgcagaccctatggagtggggagtgggggcccctggagcggagaactcgcccagcctggcccccagccagcccagcccggccggcgtgagctcatctcccgcctgagcccccgcccgctgccactccctctctcctccccttcctccctctttctttcactctttcccggcccagccccaacgtgcctgtgccaggcgccatgcccaggcgggtgccaagcccttgggggtgcaaggagtggcatgtgaagtgggggctgacctcaaagggacccctatgtcctcaactccccgcttggccagggctgtggggcatgacgttggctgtggccatctagtggcccaccctgggtgtaggcacccccagggagctggcctgcgggcctgcattcaggccaagagaaggcagagaaatgcctctggagcctgggaaataccctcagacctggctggtttcccaccccctccatcagagacccttaccattctgcaattttgattcctagttaagcctctcctaggccccactactcaattaaaagcccccattagaccaccctggagtcatggccccacactcctacctaagggagctgagtttttgctccaggccctagacccgctctccaaccatggcaacagactttagagaccactcctccagtgaaattccctctcattcttccctcccacctcccaaactgtgcctttccccagataactctgtagtattgtccagaagtcctgttcttctagctcacccccttccccaggaacttctgatcccatttatcttcagagaaccccagggttggtcttgataagtgggttctcgcaagaggactccagacattgtgctccttacaggcagccattaataaaaagcctttggcacttaatccttagctgggaggggaggggattccacagagggactcggccaattgagcctcttaagtgctgatgacttccaggaattccacttcactatctaaaccctgttttcagcaccgtcaaactggttgtctcctaggcggcactagagtcctgttttctaggtaactgtccacaaaaggactcctgctgaaaggacgcctcagtttcctctgagctaggttcctccatcccagaaacctccagccgtctttgaactcgagaggactgccctttagtcgatctcctcccaggactccagtccctttatccttctaaacggaggtggctctctgcgtcctttcctctctacagttgtggctcagaatcccacacgcgcctcccccggccgcctgcctcctccctcccctccgcacagctgtctccagctgttctctgcagccccgggagagagagggagggggtgccctcgcaggacagcccggcctcctttggctcaaaggtcccggggctccccaagggtccggaatgtggagcctccgccctgcccccgccgcacctctctctttgtttaccccgccgcacagctggcagtgccccgcccagaggtggcctggggcccagcgagggcgcgcagaggggagtggaggcgcgttcccgctcgtggctccgccccggtgctactggaggctgtaaggccgagctagaactctaaagccccagccagaaagaagttgggcggagacacagcgcggtgggcggaactagggcacccggacagcctggaggtggggtgggaggggcgtgaacaagtgagccgggcgaatcagagtgcggaaaggaaggtgggaggggctagaggcagcaggttaagctcctggataggcggggtttagaatcccgcgggtagaaggtaatgtgagaggggctacaaagggggcacagccagggggcggaggtaggacttcgtggaccaagcagagggagtgtgggcgggcatagaatgcgaaggagacagagttgggcggggagttatgccagggagtggttaaaatgtggtttgagtcaatggaagggatcagcattgggtcggaggggctggaacagcaaagggttccgtcggactacggaatgggcggggtcagcgccgtctgggctggtctggaactccgtggactcagccagaaattgggatccgagaggttgacatgaaagtgaataaacagcctgagggctggctgggctcacgcctgtaatcccagcactttgggagactgaggcagaaggattgcctgagcccaggagttcaagaccagcctggccaacatagtgagaccccgcctctaccaaatttttaaaaaacgtagcccgatgtggtgcacgcctgtcgtctcagctacttaggaggctcagatgggaggatcacttcagcttaggaggtcgaggctgcagagccataatcacgctactgcattccagcctgggcaatagagcgagatcctgccgacttagtgggtgggaccgtacctctgatggctgaacaactggactgggccaatgctgatgccagaattggggcggggccacatgacagctaagggcggagcgacttagaaatgaatgataccttgagggagtagggaccccaggagaacctgccaggaatggtggcgcccctgagtgtcctcgttctcctcccagtcctgtgtcccttgatctgtcacaatggcggtgtgtgcgtgaagcctgaccgctgcctctgtcccccggacttcgctggcaagttctgccagttgcactcctcgggcgcccggcccccggccccggctgtaccaggcctcacccgctccgtgtacactatgccactggccaaccaccgcgacgacgagcacggtgaggaaagggtggccagagtcccctccgacccctgtcaagcatttcactttgcccctgaccctcatatttcccgccttcccgagcacctttgcccagctcgccctccccgccttgtctagccccaccccgtaagaacccgtgtagacatccgtttgcccggccgtgcctcccctaggcgtggcatctatggtgagcgtccacgtggagcacccgcaggaggcgtcggtggtggtgcaccaggtggagcgtgtgtctggcccttgggaggaggcggacgctgaggcggtggcgcgggcggaagcggcggcgcgggcggaggcggcagcgccctacacggtgttggcacagagcgcgccgcgggaggacggctactcagatgcctcgggcttcggttactgctttcgggagctgcgcggaggcgaagtgagaggaggcccgtggggaggggcccggagcttgcctccgcgcgggggcgcgctcacccaacacttccccgcagtgcgcgtccccgctgcccgggctccggacgcaggaggtctgctgccgaggggccggcttggcctggggcgttcacgactgtcagctgtgctccgagcgcctgggtaagccccaggacgtccccgaagtgctcggagctggggagtggtgacaacctcaccgttcctcctactctgccctagataaacccagttcacaaattgtagccacgcctaccccattgtggaggcgacttccagtcctgagcttttcataccgctctgggaccacccaccccattttctgactttggccactctgttctcaccctgcctttgtgccttggccccccaccatatactttgggagtctccaatgttgccatttcaactgccaacctaaggctgtccctgcacttaaactacagccaacatcttttagtccctcccaccccgtcttcgtctctgcccactccattctcgctctgcccacctgtccctggcccacccctctcctctcgccacagggaactccgaaagagtgagcgccccagatggaccttgtccaaccggctttgaaagagttaatgggtcctgcgaaggtgcaacggggcaggggtgggaggggcttggttctgggggcgggatttgcagggatcaagttcctgactccacggtgacctccccaaccctggcagatgtggatgagtgcgcgactggcgggcgctgccagcacggcgagtgtgcaaacacgcgcggcgggtacacgtgtgtgtgccccgacggctttctgctcgactcgtcccgcagcagctgcatctgtgagcaaccagcagggagctgaggctgggtcccgccctccctgccctcagaagtcccagagcatcctggggcctttaattccctcggacccccccagactcccgggttcctctgtcagccttagagccccctcagaacttctcagattcttatacagcttcagcatccctggaccacctttagacctttcaagccttttggatccagatccctccagactcccagacttttttttttggagatggagtctcgctctgtcgcccaggctggagtgcagtggcgcgatctcggctcactgcaatctctgcctcctggtttcaagtgattctcctgcctcggcctcccgagtagctagaactacaggcgggcaccaccatgcccggctaaatttttttgtatttttggtagagacagggtttcgccacgttggccaggctggcctcaaacccctggcttcaagtgatctgcccacctcagcctcccaaagtgctgggattacaggcgtaagccactgcgcccagctctcccagactttctggaatccttctcagacccccaaatcctctcgtccccctcaacgactcgactatcttcagatcttgagatccttctcagagtctctcattcaccactgacaccccattgaggctccaagcccttctcagacctccagagcccactgctctccttcagaccctctcagacctctcccaaatgcccctcgcacccaccaaccccccacccccaaccccagaaccattcccctctctcccaaatccctcagtgctacagcattcccagccccgccctgaaggatttcctccctgctcctcgcagcccaacacgtgatctcagaggccaaagggccctgcttccgcgtgctccgcgacggcggctgttcgctgcccattctgcggaacatcactaaacagatctgctgctgcagccgcgtaggcaaggcctggggccggggctgccagctctgcccacccttcggctcaggtgagcccctgcggcagtgcctagccctacgcgcaacacatgtggcgctcattctacgccccaccctccaaccctgagttcactgccccaacctgactggctgggctccagccttggccacgcagcagcctctgagacccgcaggcctcagactggacagcatccatggctccacctccatctgtagccacagccacccctccattcgtagccacagctaccccggagctcccaagttagtttttgtctcctgagcgtcaacgcccagtcccaccctgtccctgaactttgaccaagtccttggcttctgagacactgccttcagcttagccccaccccaggcatgcccctccctgagacacctccctggcattctatcttctgcttaaaactaaatctcacaagggagctatttcctagcctccaactctgtccctgtagacccaaccggaccctgccctcaaccctgttcctaccaccatcccaaatgtgggaaaacgctcttggccccacctgtagcctctaagacattctactctttggccaggacaccaccccatcccagcctccagctcaaacccctgacactctccagccaagccctgcccctagccaaggccagagtctgggctggccatcgttttcttcccgctctcttgtcctctctctgtctctcttacctattcccagagggtttccgggagatctgcccggctggtcctggttaccactactcggcctccgacctccgctacaacaccagacccctgggccaggagccaccccgagtgtcactcagccagcctcgtaccctgccagccacctctcggccatctgcaggtgagctggctctggcagaagtgggtgccatcttcaaggggctgccccagccccatagtgaaaggaggcaagagaggatttgggctccactcgttgataccccttctttatcaggctttctgcccacccatcgcctggagccccggcctgaaccccggcccgatccccggcccggccctgagcttcccttgcccagcatccctgcctggactggtcctgagattcctgaatcaggtttgctagaaagaactgagggcattgggcctgcagcagtggctcacgcctgtaatcccagcattttgggaggctgaggagggtggatcaccaggtcaggagttcgagaccagcctggccaacatggcgaaaccctgtctctactaaaactacaaaaattaactgggcgtggtggcagatgcctgtaatcccagctacttgggaggctgaggcaggagaatcacttgaacccaggaggcagaggttgcagtgagctgagatcgtgccattgcactccagcttgagcgacactccatctcaaaaaaaaaaaaaaaaaaagaattcagggcattgatgggggtattacaggtgggattctggggtaaaagactccaaggtgaagattccaggttacagcaaataggaatggtatgggcagagataagcgtttgaagggttgggtggtagttagatcaggagctggagtcacagttgggctcttctgtgtcaatcgagcaagccatttaacctctgagactcagttttctcattggtaaaatggggatggttgttgagatgcctctgaagtgtctgacacctagtaagtgctcagataaatacttatggtagataattatttttcattatctaatattagataattatttctcaggtagggcactaagaatgtatctcaggcggagggttggagagcaaactattcaaagccagagaccttggggtggcatgatgaggggattcggccaaggatctgatgagaacgttccaggataaaaaagatggagatcagaagaagactgggcttgcttggggaggagacatccatgaaggtgttttatggatgtctccgggggtgggggttttactgggatgaaaggaacggaggattcagagatgggggaaccctggctgactggaccccccaggtccctcctccggcatgtgtcagcgcaacccccaggtctgcggcccaggacgctgcatttcccggcccagcggctacacctgcgcttgcgactctggcttccggctcagcccccagggcacccgatgcattggtgagcaagacggagggcgcggaaggaggcggggcggggggctttgcctggtcaccttgtcaccagccccctccgtgtcctcagatgtggacgaatgtcgccgcgtgcccccgccctgtgctcccgggcgctgcgagaactcaccaggcagcttccgctgcgtgtgcggcccgggcttccgagccggcccacgggctgcggaatgcctgggtgagaaatttgccccacccggctccaggcccaccccagggtctcgctcctgctctcactccagagcctctccagccctcccacgcttcccctctcgggtcccgccccaggactgctctgccctggcccttggccctgcccttccctgacccgcctccacccagctccagcctccctttgaccccacccctacccagctcccaaactgccagtttctatcggggcctggtcgcaactcgtattgctccgcccccacgcccaggccccgcccttattggccacgcccctccctgactaactccctcccccaggccccgccactgtcctgcaactgcggcaaccaatctcctgaccgcgaccccgattccaaccctgccacaccagagccctatccccaaactgctcctttcttctctagcccctaccccaccttcccttagcttggtccccaaagctctcctttctgcccttgcgctaccaaaccctgccctccacaattgcctctctcactgtgcccctctccggctgtcctggccgggtccccatcctggctctggcccaagcttggtcccgctcccgcttccctctacccctgcctccttgcgtcgcttctcccggggctgtctgccccagtcccagccgcctggtctgtgcctacagatgtggacgagtgccaccgcgtgccgccgccgtgtgacctcgggcgctgcgagaacacgccaggcagcttcctgtgcgtgtgccccgccgggtaccaggctgcaccgcacggagccagctgccagggtgagggcctgggaggggcagctgggaaggggtgtgagcggttgggtagagcgcagtgatgagggccagagagactgaacaatagggcaaagcgagttgatttggagacagaggccaggctctcgagcagacgtgtggcctgatggcagtagagagagacctgggatgcagaggccaagtgatgggaaacagaaaggctgagtcatgaaagatggagaagcagaatgaggagggatggagatgtcagtaatcgggtaaggggagcagagttatggaggaaaggggagaaggaggccttctcatggggactacagagacagaaccagccaggcagcttagtagggattggtggaggatgcagagtcagatgatggtgacaaggaggaatagagatggggtcacggggacagaatgttggagggtggaaagccaaagtgacagaggtcagggaggcagaggggaacaagtgaccccgggccccctgccctgtgcagatgtggatgaatgcacccagagcccaggcctgtgtggccgaggggcctgcaagaacctgcctggctctttccgctgtgtttgcccggctggcttccggggctcggcgtgtgaagaggatgtggatgagtgtgcccaggagccgccgccctgtgggcccggccgctgtgacaacacggcaggctcctttcactgtgcctgccctgctggcttccgctcccgagggcccggggccccctgccaaggtgagggtgctgagcccagccctactccatcactgtttgctgtggagactggagagagattattgaggggcagagaggcagagtgatggggctcagggatggagaacaggggctgagggatggggacctcactccagagtcttctctcctttcaacaaaataaggcagtcctccccacccctcctccctttttgaaagatactcttgtgcttatgggaaccctgaggagggggtcacctgaggcagggcaggcaacatggagttggtgccttagcccccaccttagtagctggagagaccattgaatggggacacgaggaaggtgtctgtcttcctgggaagagggagcagcctgaggcaagtccagaaggcaggctcaagactggaatgctggggtgggtggtgatggccatgggaatggattcaggccccttcctcagcctcattggtcccctctgccccagatgtggatgagtgtgcccgaagccccccaccctgcacctacggccggtgtgagaacacagaaggcagcttccagtgtgtctgccccatgggcttccaacccaacactgctggctccgagtgcgagggtgaggccggggagggagggaggagtgtggatgggtgaggggggagttggaccacttcttcaaggccaccctctcccctgccccccagatgtggatgagtgtgagaaccacctcgcatgccctgggcaggagtgtgtgaactcgcccggctccttccagtgcaggacctgtccttctggccaccacctgcaccgtggcagatgcactggtgagaccaggccctggctgtgaccttgggcctgcatcatgacccccgacccttgacccagatcacaactatgacctggccgtaacctcctgacctggacctcagtccctcagtccccagagcctgtgactcctgaccctgacctggaccacaactcttgaccctgaatgtgactcctgagacccaacttgacagtaacatttgaccctaaccatcacccttgatgatagtccctgcccataccctgatagcaattgtgaccctcatgactctggccctgaatgtgacctataactcctgaatttgactgtgacatttgaccctaatcataaccactaaccatagcactgaccataaccttgactgtgtgactcttggtcctatctctttcacagcccctgcctcttctcagaatcccttctctggaacctggttgggttcataatccctgaccctggcccctgacttgaggcagaattctggaccctgactataacttctgatcctaactggattcagattccagtcactaactctgacccatggctcagccgaatcccatccaatgatcctagtttataatacttgactggtcccttgccctagttgatttctgatccctgtctgatccctctcctgactccaaaatcctggcacaggtagttcctagaaacctagacccacaggacttgcaaccatggtccccggaacccgagaaccttggtcagccctacccacctctgccatagagccctcccccagcctccaactcatgagacttcccaccacctcccccagacaccctactccaaggggattggtcgggtgtgtcccgagactggaccctttctgaacacccccaccccccacagatgtggacgaatgcagttcgggtgcccctccctgtggtccccacggccactgcactaacaccgaaggctccttccgctgcagctgcgcgccaggctaccgggcgccgtcgggtcggcccgggccctgcgcaggtgagcagcatagggacccgccagagagtctgggagtagggcctgggttccagggcaaagccggctggaaaggtggaggcgggaccaaggcgctgtgggaggagcttagaaacctggcattggtgggggcggggttactgcgatgtgggcggagcttgtctgggaggccgggtcccgtgactccgcccaatctcccgcgtaccctagacgtgaacgagtgcctggagggcgatttctgcttccctcacggcgagtgcctcaacactgacggctcctttgcctgtacttgtgcccctggctaccgacccggaccccgcggagcctcttgcctcggttcgtacccgggctgatcctggccccggaaagggtgggcttagggcaggaaaaggcgggacggggagaagagggcgaaaaggggaaaacgagtttttagccggggtattccagcaggatcagggggcagctggtgggagtctcgaggcagtgagggggggcggggcgtggagatgaaagggccgagtctgggtatttggaccgtgattgtaaagaagctgttctaaacccgtcggggggcggtgtttgcagggagggaagtagcgtgaggcaggttggggaaggcgtgagaggcctaggagagccgaggggcggtggaggggtgtggcctagaatgttaggcggagcgggaggtgggccgggccttcggacgccctgtcccgcagacgttgacgagtgcagcgaggaggacctttgccagagcggcatctgtaccaacaccgacggctccttcgagtgcatctgtcctccgggacaccgcgctggcccggacctcgcctcctgcctcggtgagaggccccgccccggcctgatccctcctcccttcgactccccgactcgccgattggcctcccacctctgtctttcctcctccgcttctcccctccccttacctctttcccccgcctcctctcctagcctccccaactctcctctaccccaatcttctcctgccctctcctctgcttccccggcctcccccttctgactctcctctcccctctttgtatcccccatcttgcctccctgcttcccacatccgaccacccgacctctctcctcagacgtggacgaatgtcgcgagcgaggcccagccctgtgcgggtcgcagcgctgtgagaactctcccggctcctaccgctgtgtccgggactgcgatcctgggtaccacgcgggccccgagggcacctgtgacggtgagcctgcccccacccgccttcgctagcgcttgcaacgcggtgctggaggctgctcccttggggactgaggaggggcgccctgcttcccagacttaggcggagggaaagaacaccctctcaccgtatctctgtagtggaaataagccgccaccgtgtccatgtattttcttgtgtcaggatcacggccaagcctcccttccagccgcagtccattccccctctgcagctgaagcccggtccacattttaggctatgcccccagtaagacaccgccccaaaactgttaggccccgccccttccaatcggcctctggattaaaaccccctcttcaggccccttctcttcctaacagaagtttggacgtgccctttccgcgccctccaccagtcctacttccagccttccctccaaagaggcccaatcccggtggccctaggccccattctttcccaatgagaaattcccaaggtgaaattctcctagcattggcccccgcccgtttaagctctgcccttccttggtctctctagacagggctttccattcgctcggatggctccagtctctcgaacacttaggccctcccttcctatctttgctccgcccacagacccgccccttgccttttcttactttccaggccttccctcccgccccgctctttcacccctcccgggtcaggctccagcgaggcaggagggtggggctaatcttccatacagtatatatttttttgtgtcggcgggggggggggggcggtgatggtgtgtgagtccgcatcttgtggaacacatgaaacaaaacatctgtgggctgccgttgactctgctagacctctgactcatggaaatctagcttcataagatctcattcattaattccacaagaattcactaagcacctactctatgccagcgtctggaaaaggtaataagagcaacaggaaataagtcatataaaaacccctgccttcctggagttattgtggggtaataaatatgtaaataaattcaagatttatacagcaggccaggagctgtggctcatgcctgtaatcccagcactttgggaggccaaggcggatggatcacgaggtcaggagatcgagactagcctggccaacatggtgaaaccccgtctctactaaaaatacaaaaattagctgggcatggtggcatgcgcctgtagtcccagctactcaggagactgaggcaggatactcgcttgaacccgggaggcggaggtggcagttgagccgagatcgcgccactgcactgcagcctcggcgacagagtgagattgtctcaaaaaaaaaatttatacaacaaaaaactggggggcaccttactatatgttgggcactggagatgtagcaaggaacaaaatagacacaaatccctgctattgtagagtttgtattctagagaggcgacagttggcataccaataaatacatacgtataacatcaggtttaggaaggaaaacaaagcaagacaaatgggacagagatgacagagcagtggatggaggagtgctaggagggcttgacctagacaccagacagaagcgagggaggcagccatgcagagagctgaggggagactgttcctggcagagggaagagccagtgcaaaggctctgaggcaggaccatgcttttgagaaatggcagtgaggacttgagagttatcaactatgctaggtgtggtggcacaagcttgtaatcccagctactcaggaggctaaggtgggagaactgcctgaacccgggaggttgaagctccagtgagccatgatcctgtcactacactccagcctgagcaacagagcaagaccccatttaaaaaaaagaaaaaaaagctggatggggtggctcatgcctataatcccagcactttggaaggctgaggcagctagattgcctgaggtcagaagttcatcaccagcctggccaatatgatgaaaccccatctctactaaagaaaaaaaaaaaagatagtggctgggcgtggtggctcacacctgtaatcctaggacttgaggaggccgaggtggacagatcgcttgaggtcaggagttcgagaccattctggtcaacatggtgaaatctcatctctactaaaaatacaaaaattagctaggcatgatggtgcatgcctgtagtcccagctgctctagaagctgaggtagaattgcttgaacctaggaggcaaaagttgcagtgagctgagattgagccactgcactccagcctgagtgaaagagcgagactccgtctcaaagaaaaaacaaagttttcaacattgttgatcttcagaagctcaggctcctagaataccagattgctaaagacttcttagtcttgggcaccggaagtggtgttagaacttctgaattcaggcctttgactcccctttcatctcctccacactctgcagatgtggatgagtgccaagaatatggtcccgagatttgtggagcccagcgttgtgagaacacccctggctcctaccgctgcacaccagcctgtgaccctggctatcagcccacgccagggggcggatgccagggtgggtgtccatcaggcatcgggtgagatgtggagatggtagaaggtccagaaatggcctgactgtctggtggttgcagatgtggacgaatgccggaaccggtccttctgcggtgcccacgccgtgtgccagaacctgcccggctccttccagtgcctctgtgaccagggttacgagggggcacgggatgggcgtcactgcgtgggtacgggacttcaggaggtggatgggaccaaagggggtgggggaggttggtcaggccctgtccctccccatatatctgaacaaatgggaattttcgggttgtggaatttagactttggaatataagatcatcttcatgccaggcacggtggctcacgcctgtaatcccagtactttgggaggccgaggcgggcagatcacttgaagtcaggagtttgaaaccagcctggtcaacatggtgaaaccccgtctctactaaaaatacaaaaattagccggatctggtggcaaatgcctgtaatcccagctactcaggaagctgaggcacaagaattgcctgaacccaagaggtggaggttgcagtgagccaagattgtgcaattgcactccagcctgggtgacagagtgagaccctgtctcaaaaaaaaaaaaaaaaaaaaaaaaatcagaactgttgtagtggctggtgacagaaacctgacttaatcaggttttatttttgtgtgtgttcttttaaaaatgtataaagtataaatgtataaagtactaatcttaagtgttcataaacattaatctttcctaacattttatgaggaaaatttctaaacacaaagcaaattgagagaatcatagaatgaacacctacctactcatgatctagattatattatcattttattacacttgcttcctcacatatctatccattaatccatctaattttttggacagagttaaaagtaaattgcaggcaccagtctgcttccccataaattcttcaatatgcatatcactaaccagaattcaatatgtgtttaccaatgtattcttctcttctctcttttttttttttactttgaggtggggtcttgctctgttgcccaggctggagtgtggttgtttgatcatagcttactgcagcctctaactcctgggctcaagccatcctccctccagaactgagcttccgagtagctgctaccacaggcacacgcaaccacgcccagctaatgtttttaatttttgtagagatgagttttttttttttttttggagacagagttttgctctagttgtccaggctggagtgcaatggcatgatcttggctcactgcaacctccacctcccgggttcaagcaattctcctgcctcagcctcccaagtagctgagattacaggtgcccaccactatgcccagctaattttttgtactttgagtagagatggagttttgccatgttggccaggctggtcttgaactcctgaccttaggtgatccgcccaccgtggcctcctaaagtgctgggattataagcatgagccaccacgcctggcctgtagagatgagttattgctctgttgcccagactggtctcaaactcctggctttaagcaaccctccctccttggcctcccaaagcactgggattacaggcatgagccattgtaccctacagatattttcattcaacgttcaatttatatacagtgaaatgcagcaatcttaattatacattctgtaaattttcacaaatgcaaacacaacaggttttatttctttaaagggaattaaaactataaagtcttgggatatatttgaactccaggcataactggatccaggaattttaacaaggctatttctatcttctctgagttctgctttcttctattgcatgattttcaggcagattatttttcacaatgatgaaggtggccctagaacctctgggctaacatctccagtgggccacccgagagctaaaaagggaggtttttttttcaatatttctagcaaaagcgccaggcctggctttgattgacccagcatgatcactgcctatgtctgaaccagagaaatgccgtcatctgtttggtcattcctggaacttgtgcccacctctcagagtagatatagccctactcaaagaacaggattgaaaatagaggagcacagggttcccaagggaaattcaaggtttctcactagaagaaaaacagatgatgggatctgggccattaaatatacacattatatttgaaagctgagactttcggacctttggaatcatagaagcttataaccactgagtccctctcccctgttgtctcctgcttacagatgtgaacgagtgtgaaacactacagggtgtatgtggagctgccctgtgtgaaaatgtcgaaggctccttcctctgtgtctgccccaacagcccggaagagtttgaccccatgactggacgctgtgttcccccacgaacttctgctggtgagactgatgtgtctatttaactgatggcggctggccccatgggaaaatcacgtggtctaatcattcctgatgtggacagctaccatcagctaaatactgttgttttaaacatcaacaaaagacacataagttaacatgggtagtgagactgtgtcaggagaattagaccctggtcctgactctaccagattctttcattcaacaaatgttcacagggtgtgcactgtgttcaggccatcttctgggcactgagaacatagtagtgaccagaagggatcactgtctgtcctcaaggggctcacaagccaatggggcagacagagatatcaccagatagtgacaacccagagaaatcaacaagactgtgacggggaaagcccaggggggttttggaggaggcgcctggcccagcatgagaagaggattagggagttcttcctgtaggagacgacatctgaactgagagctgtgggatgaatagaaatgagccaggcccgatgagtgaggagggcattctgggcagaggacacagcaagggcaaaggcctggcaaagccagagagcatctggcatgtgagaagaactgaaacaggttcaacatggcatgatttagagagcaaaggaaggggtagggagagatggggccagggaaagagtcaggtgcccgatcacactgacttatcacagtaagagagcactgcggtaccgtggaaggggtttcggcgttttttttttgaaaattttttttaaatgttttttttttaagacagggtcgtactttcacccaggccggagtgcagtggcgtgatctcagctcactgcaacctccacctcctgtgctcaaggaatcctccaacctcagcctgctgagtaactgggactacaggcacatatcaccacaacagctaatttttgtattttttgtagagatgtggttttgtcatgttgcccaggctgcagtatttttttttttttaatttttaaatgttacatatttaggctaggattggtggctgaaggccataatcccagctctctgggaggccaaggcgggaggatcacctgaggtcaggagttcgagaccagcatggccaacatggcaaaaccctgtctctactaaaaatacaaaaattagctgggtgtagtggtgcacgcctgtaatcccagctattcgaaaggctgaggcaggaaaatcgcttgaatccaggaggcggaggttgtgggattgcaccactgcactccagcctgggtgagagaggaagactccgtcccaaaaaaaaaaaaaaaaaaaaagctatgtatttatttatttttaataatttccatctttactttagattcaggggatacatgtgcaggctttttacctgggtatatttcgtgatgctgagctttgggatacaaatgatcccgtcacccagatagtaagcacagtacccaacagccagtttttttttttctttgagacggagttttgctcttgttgcccaggctagagtgcagtggcgtgatctcagctcactgtaacctccacctccctggttcaagtgattctcctgcctcagcctcctgagtagctgggattacaggtgtccgccaccacgcccagctaattttttgtatttttagtacagacggggtttcatcatattggtcaggctggtctcgaactcctgacctcaggtcatccacctgcctcggcttcccaaagtgcagggattacaggcgtgagccaccatgctcggcccaacagccagtttttcaacccttgtacctctgtccctcccccatctagtggtccccagcaactattgtgggcatctttacatccatgagtacccactgtttagctctcacttgtaagtgagaacatgtggtatttggtcttctgtttctgcattaatttgcttaggataatggcctccagctgcatccatgttgctgctaaggacatgatttcattctttttcatggctgtgtagtattcatggaagggttctaagcaggaaagatagaatcagattttgaaacctccctctggccgccatgtgaaggtgattgaagcgggtgatatggaggctgggagctcagggaacaggctggggcaggggcctggacaggagagaacagggctggaccaaggcaggggctgtggaaggggaggagaaggtggtgggagaaaaacccaagaggccatgtggacaagctgtggatgtctgggtggggaagctgtgtccaagacaaggcataggttttttgtttgtttgttttgtgacagagtctcgctctgtcgcccaggctagaatgcagtggtgtgatctcggctcactgcaacttccgctcccgggttcaagcgattctcctgcctcagcctcccaagtagctgggattacaggcatgcgccaccacacccggctaattttttctatttttagtagagaccgggtttcaccatgttggtcaggctggtctcgaactcctgacctcaagtaatccaaccgcgtcggcctcctgaagtgctgggaggacaggcaggagccactgcacctggcgacaaattgtaggttttgagatgaagactcagccagtttgccacacactggataagagacccagagaggcatccaggaagccagggaagttccctcaccacccacccaagctgttagctgcagtgacgggaaagtgtgaggtggggaggcaagagatgcagaaatgacaggaggtgacagtgggagaaagagaaacagtgacagaggagcgtgagaggtgtggagtctggttctgccactgatggctgccaccctctgtttccctatctatgccagcctcagtttccccatctatgatagtggcggggctggggattcagcccacactgggctaaagctccttgtctccccaggcacgttcccaggctcgcagccccaggcacctgctagccccgttctgcccgccaggccacctccgccacccctgccccgccgacccagcacacctaggcagggccctgtggggagtgggcgccgggagtgctactttgacacagcggccccggatgcatgtgacaacatcctggctcggaatgtgacatggcaggagtgctgctgtactgtgggtgagggctggggcagcggctgccgcatccagcagtgcccgggcaccgagacaggtgggcatgggctgatggggacacagggctgagggcttgggtggaaatactgggtggggtgtgggcctgggacaggggacacttttggacagggccttgaggtactagtactgtcagggcaagggcgagctgccaggcaggtgggcatgggcagacataaggctgagaggtgggcactaacaggcacagggccagagggacttttgtgacaagtgggcacgagcaggtcagggctggggctggggctctggtgtcctggctcaggcttgtctctgtgtgtagctgagtaccagtcattgtgccctcacggccggggctacctggcgcccagtggagacctgagcctccggagaggtgaggccagcctttgaccctccaccccactcagctctgaggcccagcttcgtctcttcctgttttctttgcctctgtctctcaccctttctgtttctctgtatctgtctccccgaccccacccatactctgtctctttctttcttttctttcttttttttttttttcttaagatagagttttgttcttgtcgcccaggctggagagcaatggcgagatcttggctcactgcaacctttgtctcctgggttcaagcgattctcttgcctcagcctctggcgtagctggctacagacactagccactacgcctggctaatttttttgtatttttagtagagacagggtttcaccatgttggccagattggtctcgaactcctgacctcaagtgatccgcccaccttagcctcctgaagtgctgggatttcaggcatgagccaccgctcctggcctctccatctttctttccctgtctctacttcttggtctatcaccagctctgtctctgtcttcccacgtcatgccctcacacactccacccatccagcccgcccccatctctctctctgcttttcgcacagacgtggacgaatgtcagctcttccgagaccaggtgtgcaagagtggcgtgtgtgtgaacacggccccgggctactcatgctattgcagcaacggctactactaccacacacagcggctggagtgcatcggtacaagccccacctcccccaacccccggcaactctctccaacccctagccttgccagctcccctctggaatgtggccaccaccagcgggaagtctttcctggagtctagactccatccatcacactgccaatgtgctgggaagagaaatgggaaagggtggggagagttgaaggggatgcctcttaatcatcctctccctagacaatgacgagtgcgccgatgaggaaccggcctgtgagggcggccgctgtgtcaacactgtgggctcttatcactgtacctgcgagcccccactggtgctggatggctcgcagcgccgctgcgtctccaacgagagccagagcctcggtaaccccgcccacgccatccaggccctccttcccttggctcggcctcacacccgcacccgggccacacctttgcgacggccacgccctccgaaggccacgccccatgctcctggctcgaccacgccccactgagccctcactcagtctctgtcccactgtctgtctctctgaggcgagctggctaggtggttaaaggcaaaagttttagggcaacctttgcatgttgcctcttggactccaggtttctttctgcacactgggtgaatagcccctaccttatagggtggctgtgaggaattttatttaattttatttatttattttttgagacggagtttcgctcttgttgcccaggctagagcgcagtggcgccatctcagctcactgcaacctccacctccggggttcaaacgattctcctgcctcaggctcccgagtagctgggattacaggcatgtgctaccacgcccagctaattttgtatttttttctttagtagagacagggtttctccatgttggtcaggctggtctcgaactcccgacctcaggtgatccgcctgccttggcctcccaaagtgctaggattacaggtgtgagccaccacacctggctgatgaattttattttattttattttatttttaatttttaatttttagttttattatttattttttactaagtaccacatgagtgctgcctgttattatttatctgcatctctaggtctctgtctctttccagctgtttgtggatttctgtctttggggttttctctgaatttctgacaccctctggatctttgttttcaggtccctttctcctgcctctgtatctttgttttcctgttttgagtctttgactctttggatgtgtttctctctctctctttgggtcttttttctcccttttcgtttctgactattttcctatctctaggcccctaacaacttctgctgaagctctgtctcttgaacactctacttgtcgttgtttgttttcatttttgagacaagatctcgctctgtcatccaagctgaagtacagtggcacaatcacagctcactgcagcttccacctctcatgcccaaatgatcctcccacctcagacttgcagtagctgggagtccaggagcccgccaccaagcctggctaatttttgtatttatatatatatatatatatatatatatatatatatatatatatatatatatatatatatatatatttttttttttaaagatgggtttttgccatgttgcccaggctggtcttgaactcatgggctcaagcaacccccccacctcagcctcccaaagtgctgggattacaggctccaacacactctctctgtgcttcttgccacctctctttttgcccactgtcccaaccactcttctctcatttcctgtgccttcagcacttacccccatacagtgagatgtcagacaatgctcagagaagcaaagcaactgccccgaggccacacagccctccagaggccagacttgggtagacccctctcaggccctacctcccagtcattggacaccttcttctgccctctcctcctatatgacagtctccttgttcctcaatccagaaccctggagtgacctcagagaacttccagagttagatcacagctgatgagaaggatttgctgataggcagagggtgcctgggctgctcagcaggggaagggtccagcccctgggaggacctgagtgccaggcccactctgacacatgctgtctccacctacagatgacaatctgggagtgtgctggcaggaagtgggggctgacctcgtgtgcagccaccctcggctggaccgtcaggccacctacacagagtgctgctgcctgtatggagaggcctggggcatggactgcgccctctgccctgcgcaggactcaggtgctggcactggcctaggctgaactcagaggccttgccccatgggctccaaatctaggccctcagatccccagtcgcagaacccccagactctatccaaactctgtcccctagaccaacccctatgtcgcagcccatcccaaaatcttggtccccgattcacactccaaagacttccaagtctcagccacagacatcccaaggcctgacccagcagatcccatagtaccagacccacaggcccctgaggtctggtctctcatatgctcagctcctggtctctagaaccaccagacacagcctatgagatgtcctcccctaaatcctgggcccttagacctgaaatgccagttgctcagacctcaccatcctggccccagaccccctggtcacagccccacagacctccaagtcccattgccttagacaccctccaagtcccattgccttacacaccacatccgggtgcctaagaccccaacacacagccccagagattcccaagtcttggtttctacaacctctgagtccctcagtcctcagcccttaggaacccagttccaaagccccagtcctgggtcctcagacctccaggtcccagtgcctcagactgtctcccatgcatcctgccccctcaggtccccagcagcaatccctgggattccccagtcctggtccacagaacacccccatctaatttcttcaggtccctagtcctagctcccatgggtcgctccaattccagcctctcagaccctgattcttagcaggcttcattacccttgatctcagcacgtccgaatcccagtctcagccttcagattctcagcgctggctccagaaaccccggggccacccaggaccctccccatccagtcctctgcctcctctcccaaggggggtatgtgagtggtgggtgtgggggccagcaggggctgattgtttgccttggctcctgttcccagatgacttcgaggccctgtgcaatgtgctacgcccccccgcatatagccccccgcgaccaggtggctttggactcccctacgagtacggcccagacttaggtccaccttaccagggcctcccatatgggcctgagttgtacccaccacctgcgctaccctacgacccctacccaccgccacctgggcccttcgcccgccgggaggctccttatggggcaccccgcttcgacatgccagactttgaggacgatggtggcccctatggcgaatctgaggctcctgcgccacctggcccgggcacccgctggccctatcggtcccgggacacccgccgctccttcccagagcccgaggagcctcctgaaggtggaagctatgctggtgagcactgccagcgcatgatgagactgagatgaggggtgaggtgtgcacggagagaggagggagggaaacagaaggcgggaggagagacggaacacaggtgcaactggagagagccacagaaagggacagagaagtgtctatagcccggcaaagaaagagaaggtggcagagggaaagctggcgagagaatgaggtaagcttactggccccgcagcacccgccacagccctggagcgggatggacagtttacagcgagaaagatggagccaaggacgcgcacccaccgttgtgggtaaggggtgaaggcagggacctcaagtcatagggtccccgcatttcccacaggttccctggctgagccctacgaggagctggaggcggaggagtgcgggatcctggacggctgcaccaacggccgctgcgtgcgcgtccccgaaggcttcacctgccgttgcttcgacggctaccgcctggacatgacccgcatggcctgcgttggtgagggcgggcccggggccagcatgcgcagggagaggcgaggcttgtccagggagggtggaagccctgactagggggtgctggtcagggacgggaaaggacctcactacaggggacgggccagcgcaaaagggaggagtaattcttccacctgggtggggcttgactgaagaaggcggagtcagggtgccagcagggcagggcttaaccacggggctggagccgggccttgaagcaggatagaggaatagaatagtgctggtgtgacttgcagtgctaccttgggcagtctgcaggacctctttggagagcctcagtcttcccacctgtaaaatgggaatattaatcaagtctgcctaatttggatggcagtaaagccaagtgattaaaatcaagaacatagccgggcgcagtggctcacgcctgtaatcccagcactttgggaggccgaggcgggcggatcattaggtcaggagtttgagaccagcctggccaatatggtgaaaccccgtctctaaaaatacaaaattagccgggtgtggtggtgcatgcgtgtaatcccagctactcgggaggaacccaggaggcagaggttgtggtgagccaagatcgcgccattgcactccagcctgggcaataagagcaaaactccgtctcaaaaaacaaacaaaactcgaggaggtcacatagacctcagactcagtccagcaacttgctgtgtgacgctggacaggtcactgtcccttacctaatttttctgatatgaaaaatggctacagtcaaagatcccatttcatagaattgcgaatattattaacactgatttacaataacattgagagtcatgtgcaaatggaggcacatgcgtaaaacgaattacagtacctacctaataggggtattagaaggacaaagttaatacttgtaatgtgcttaaaacaatgcatgaacatttattgttgttgacaccatcatcagtatttttttcttcttttttttttcttttcttggcgacagagactcactctgtcgcccaggctggagtgcagtggcctgatctcggctcacagcaacctcctcctcccaggttcaagcgattctcctgcctcagcctctcgagtagctgggattacaggcgcccgccaccatgcctggctaatttttgtattcttagtagagacggggtctcaccatgttggccaggttcgtctcgaactccggcctcaagtgatccacccgcctcagcctcccaaagtgctgagattacaggcatgagccaccgcgcccggccattattattttcttaacaaaatcctagtgcggtatgggccaccatatccatcttacagaacacgaaactgaagcacagtgaggttaagccacctggccgggctcacacagttagcagatggcagaggccagattggactccaaactgctcagcatctgtgctcctctgttccaagaacttaaggggccaaggaggcgagcttctggggccccagccttcagcagcgatcgttgtctcccctccgcagacatcaacgagtgtgatgaggccgaggctgcctccccgctgtgcgtcaacgcgcgttgcctcaacacggatggctccttccgctgcatctgccgcccgggattcgcacccacgcaccagccgcaccactgtgcgcccgcacggccccgggcctgagccctggcacccgctggccgcccacccgcgcccgccactcggggcccctgccgcgcatcctgcagcccgcttatgcgtatgtgcacggggccgcccgcctggacctggagaagggacctacggacgcctggaagctgcgacgccctgcactgctcccgcctccaccagcgcctcccactgatgtcgtggtcccgggcctggcccaggggcccctttacatgccctctcccttttataaaattttccattaaaaaccacctattttctatcttttgcctcctcctgtctatttctccaagtctaccccagtttgtgctttgagtcactaaatgacattcccttcccttctgacccctagtttcgtctgtctctctgcctctcttggtctctgtcttccttctctctctgtctctgtcgttctatctcatctctgtctctttctgatttgttttctctgcctaacctctacatcctgtcttttcatttctgtttctgcatgcgtctttctcttttcccttctctttgtttggttctttcatctcgagagcaatcttgcctctggattttttttttttttttttttttttttttgagatggagtctcactctgtcacccaggctggagtgcactggcgccatctccatccactgcaacctctgcctcccggtttcaagcgattctcctgccttagcctcccaaggagccgggattacaggtgcacactacaacccaggctaatttttgtatttttagtagagacggagtttcgccatgttggccaggctggtctcaaactcctggcttcaggtgatccacccaccttggcctcccaaagtgctgggattacaggtgtgagccaccgcacccagcttttattttttagagatgaggtctccctatgttgcccagtctggtctcaaattcctgggctcaagtgatcctcccacctcggcctcccaaagtgctgagattatagatgtgagccaccgtgcttggcctagaagtcttaagctgtcctggaacaagtggggcaagagcagggagcaggagtccctggagggccaaacccagacctgacgctccagctaggagttggctgtggatggagtatggagcggcagtcctgacagctggaggcgggaatgagctctgtgtgtgatggtggagtgcccagcacggacctcctccatgtgccctgcctgcttactggccatgttcctagtccagactcctcctccctaaaaaacaagaacggcctagatcagcataaacttagggcaggagtaggggtcgggaatcgtgggtgatcaacttggcactgggccaagctgggaaaaaaaaaaaaaatgtacctcagccaggcgcgatggctcacacatgtaatcccagcgctttgggaggcccaggcaggcggatcacgaggtcaagagatcaagaccatcctggccaacatggtgaaacctggtctcaactaaaaatataaaaattagcccgccatggtggcatgcaactgtaatcccagctatttaggaggcggagataggagaatcacttaaacccaggaggcagaggttgcagtgagccgagatgacgccactgcactccagtctggcgacagagccagactgcatctcaaaaacaaaaacccacaaaactgtacctgtcattcttcacccacctgtcaattcttgtgtccccagggtttcaaactcatatgctgcaaagaccagaaccggaatgttagcaggaagcagggaaaattgaggcacacattaccttctgcctaaggcttggttagactaggaaggggaattttccccattgttaatacttttttttggcctggcggggtggctcacgattgtaatcccagcacttcgggaggccaaggcaggatgatcacttgagctcgggagtttgagaccagcctggcaacatagtgagaccccatctctacaaaaaagtagctgggtgcgatggtacatgcctgtagtcccaactacttgggaggctgaggtgggatgattgcttgagcccaggaggtcgagactgcagtgagctgtgatcgtgcctctgcattccagcctgggtgacaaaggcataccttgtctccaaaaaagttttttttaatgtatatttttaataactatctgatattgtttggctgtgtccccacccaaatctcatctcaaattgtaatcagaattgtaatccggggaaggacctggtgggaggtgattggatcatggggacagtttcccccatgctgttatcgtgatagtgagtgagttctcacaagatctgatggttttataaggggctcttctcccttggctcgctgtctctcctgccgccttgtgaagaaggtgactgcttcccctttgccttctgccatgattgtaagtttctgaggcctccctagccatgcagaactgtgaatcaagtaaacctctttcctttataaattacccagtcttgggtggtatctttatggcagagtaagaatggaccaatagggccgggcacggtggctcatgcctgcaatcccagcactttgggaggctgaaacaggtggatcacctgaggtctggagttcaagagcagcctggccaacatggtgaaaccccatctctactaaaaatacaaaaattagcagagcatggtggtggatgcctgtaatactacctactcgggaggctgaggcaggagaatcgcttgaacccaggagccggaggttgcagtgagctgagattgggccactgcactccagcctgggtgacagagcaagactctgtctcaaaaaaaccaaaaacaaacagaaaaagactaatatagtaccctatggggcctatttggcctatgaggctccagttttaatcctctaggcactgctgaaattgcataaattgtggattggaggctgcttcctgacctgatctccagcccacccgctgagtgtcaggaggggtcacatgcccagcagcctcctgtgctacatcggggaatcatactaagagcgcctaccctgcaggattggtggtggtggttaaatgaattgtcatatatgtgcttagaatgtcacctggtacagagcaagggctcagtcattgttggcataaccctgggcctcccaggatatgctgagccctgtggctgggcagatagtaaggtcttgttcttttctcttttcctttccttcttccttttcttttctttctttctttctttcttttttttttttgacatagggtcttgctctgttgcccaggttggagtgcagtggtgccaccatggctcactgcagcctcaacctcccaggctcaagtgatcctcccacctcagcctctcaattagctggaactgcaggcatgtgccaccatgctcagctaattttttaatttttattttttgtagagaggggaccttactgtgttgcacaagctgatctcaaactcctgggctaaagtgattctcctgcactttggcctgccaaagtgctgggattacatgtatgacccacggcacctggcctggctaggtctttttctttaccaattctccctcccagggtggaggaggaggccagaccccatccccttcaacaggacagtgagaaacacctaacacaaggccttggtggggaggagtgtcagacaaggagtggctcaaggctccacaaaggggtgacagttgcacaaaactgtctgtaccaaaaatcattgaattatacactacacatgggtgacttgtgtggtatgtgaatcataagtcaataaagcccttctttaaaaacgccgactctacaaagcgtttcagaaagttaccctccagctgatacagggaacccgacccaaccactaattcctcagtcattcattcaacaaatattttcctgctttgcaataagtgaattcgaggaacacaaactttaacccagccttggggggtggttagggagggctcctggaggaggagatgttggagctgagagttgattactgtagggaaatgagcaagatgaaaggggtggaggtgcctataatcccagctactccggaggctgaggcaggagaatctcttgaacccgggaggcagaggttgcagtgagccaggattgcaccgctgcactccagcctgggcaacagagtgagactctgtcagaaagaaagagagagagagagaggaaggaaggaaggaaagaaggaaggaaaagaaagaaagaaagaaagaaagaaagaaagaaagaaagaaagaaagaaagaaagagaaagaaagaaagaaagagagagaaaaagaaaagagaaagaggtggagaaccatgttccaggtggaggggacagcacttccgaaggcctagaagtaagagagcaagtgtctgttagatgtctttcctttggtatctaaggcctgtattggacaacaatggtgacaatcttggtgcctgagaaatcccaggcccttgccttcatgggggacaccgacacatcaccacacatgagagcctgtgctgtatgggggaggcacaggcaggggtcaggctgcggtgggggaagatcagagggcatgcatgcccagaggagacacttgatccagtctgagagatgatcagggaaggctttctggagaaagagacaaagctctgaacagtctctgtttgggcgtctagatccctttgagaatctgtcgaaagctcattcacagaagaaaaactcacacaaacaaaggttgcaggcaatttccaagtattctcatccttcctcggaatcttctgtgggtatcccattcccaccccgcccccacaaccaccttgctgcataaatgtcccaggaattgcgacagggctggccaacagtgctggaaaactgcaatcgaatttcagcatcctgggagtgggatctttcttctgagatctcgcccgccgccgggcctggagggtgtgccccatggatctaattgttatcctgcctgcatcccctgcactaacccccagacctggcgttggggcttctggcactggccgggaccgacgcgttctcctctggaatgttcagagggaggtagtccaggcggtcaccgcgctcgccagacaagcaacgcagcgccccccgatggccaccgcgcgccggcgcagcccaagccggctgcgccccctagtggccgatgctcgtaaagtcttcagcgagccccgagcttttgctagccagcccttggttttgcaggctggggtcatcgtcgttgtcatcgttggcatcatcatcatcatcatcatcatcatcatcatcatcaatagctagtaggcttggcgtggtggcccacacctgtaatcctagcactttgggaggccgaggcaggtggatcacttgaggccagaagttcgagaccagcctggccaacatggtgaaaccccgtctctacaaaacagtacaaaaaagcaaccgggtgtggtggtgggcacctgtaatcccagctactcgggaggctgaggcatgagaatagcttgaacctggaaggcggaggttacagtgaactgagatcgaaccactgcactccagcctgggcaacagagtgagactctgtctcaaaaaaaaaaaaaaaaaaaaagctatgatcatccaggcagtgattcatgcctgtaaccgcagggctttgggaggccaaggcaggaggatgtcatgaggccatgagttctagactaacctgggcgacagagcaagagctgtctctataaaacaaaacaaaatgctatagaccagacgcagtagctcacacctataatcccagtgctttgggaggccaaggcaggcggatcacctgaggtcaggagttcgagaccagcctggccaacatggtgaaaccccatctctacactttgaaaaccactactttaactgtctctcccacagggagagctgcctccttcactctcagctcatttggttcacatgttgaccctactggaagactccagacctggccagtgagagaatcccttcccttcagcctttgcaactggcttagggacaggtgtgtccctgaagctggactgatgagcattggctctggaactactgctgattgttgaagaaggggcttcctagacatactgtgctgaaagggcacaggcttggaacactgggttcttacatgggagaagagctggcctgaaaatgcagccaacacgaggggaagcagcgctgggagaggaacagagagactggtgcctggcgcacgtcatctgcacctctgtctcacccttctccagaacatttctttgcatcttacatcaaatttgtcagcaaattctgtcggctctagttagaaaaggtgtcccattctgtgttggaggaaaagcgatgctgtctatcaggacgttaccgggtcagttgacagaactggaatacgaacagtcgattagaaaaattcacatactaatattaaatttactgaagttgatcactatattgtggtcatgtaagagaatatccctattcttttgttttgctttgttctgtttttgagacggagtctcgctctgttgcccaggctggagtgcagtggtgcaatctcagctcctgcaacctcctcctcctgggttcaagcaattctcctgcctcagcctcccgagtagctgggactacaggtgtgtgccaccatgcccagctaattttcgtattaatatttccagtacagacggggtttcaccatgttggccagggttctcgaacttacggcctcaagtgatctgcccacctttgcttcccaaagtgctgggaccacaggtgtaagccacgtcgcctggccagaaatatccctattcttttcttttcttttcttttttgagatggagttttgctcttgttgcccaggctggagtgcaatggcgaaatctcggctcactgaagcctctgcctctggggttcgagaaattctcctgccttagcctcctgagtagctgggattacaggcacccaccaccacacccagctaattttttgtatttttagtagagacagagttttgccatgttagccaggctggtcttgaacttctgacctcaggtgatccgcccccctcggcctcccaaagtgttgggattacaggcatgagccaccgctcccggccaaatatcccaattcttaagaaatacatagggcggctgagcacattacctcatgcttgtaatctcagcactttgggacactgaggtgggacgatcccttgagcccaagagttcaagaccaacctgggcaacatggcaagaacccatctctcaaaaactttaaaaatgatccaggtgtggtggctgcagtgtcaaggctgcagtgagccaggatcatgccactgcactccagcctgggtgacagagtgagaccctgtctctacggaaaaaaagaaagaaaagaaaaagagatacattacagaagtttttgtttgtttgtttgtttgtttgtttgagacagtcttgctctgtcgcccaggctggagtgcagagtgcagttcagttcactgaaatcctggttcactgcaacctcacctcccgggttcaagtgattctcctgcctcagcctcctgagtagccaggactacaggtgtgtgccaccacacccaggtaatttttgtatttttagtagagacaaggtttcttcatcttggctgggctggtctcgaacttctgacctcagatgattcgcctgccttggccttccgaagttctgagattataggcatgagccaccgtgcccagcccattatagaagcttttaggggtgatgttgtttgtaacttagcctcaaagatttttttaaaaatcagaaaaagaaaatacataacagagaagagagcaagtgataaaggaaatgaggtagaaatgttaccaatccatgaacctgagtataaaatacaagagagttctttgtcctattatttgtcttgcaactttttggtaaatttgaaattatttccaaaggaaaagttaaaacactttctaaaattgagagatctaaaatcttaggccaggcgtggtggctcacacctgtaatcccagcactttgggaggctgaggcaggtggatcacatgaggtcaggagttggagaccagcccggccaatatggtgaaaacctgtctctgctaaaaatacaaaaatcagctgggcatggtgggaggtgcttgtaatctcagctactcaggcacgagaatcgcttgaacctggggagcggaggttgcagtgagccgagatggcgccactgcactccaccctgggtaacagagcaagactccaactcaaaaataatatgaaataaaataaaatcttagacaacactatcattataagtaggattggggagatcaaaaacaacatgctctgtgctccaggtactgtttggtgtgatgttgaaaatattagattttaaacttgattttttcttttttttttttttgaggcagagtgttgctctgtcgcccaggctggagtgcagtggcgtcatctcggctcactgtaacctccgcctcctaggttcaagcgactcttctgcctcagcctcctgagtagctgggactacaggtgtgcgccaccacacctggctaatttttgtatttttagtagagacggggtttcaccatattggccaggctgatctcgaactcctgacctcatgatctgccctcctcggcctcccaaagtgctgagataacaggcgtgagccactgcgcctagcctagacttgattttttaaatttctgtcctccaatagaaatagacctgatttttaaaaatgtgcatggccaggcacagtaattcatgcctataatcctaggactttgggaggccaatgtgggaggatcacttgagcccaggagttggagatcaacctggacaacatagctagaccctgtctctacaaaaataaaaatattaggtgggtgtggtcttgtacacctgtagtgccagctacacagggggttgaggagggaggatccattgagaccaggagttccagcctgcaacgagctaggatctcaccactgcactgcaggctgggcaacagagcaagaccctgcctcaaaaaaaaaaaaaaaaaaaaaagcatgttaaaatttcaaagattgctacaaaaagaaagaaatggtgcatagattccaaactagtagagggaaaacaaagaataagaaaacataagacaaaactaaacaaaaaatgcagccaattcaaagaagcttaaatgagcatgaaaaaataaataaacgtagaaaaatgaggacactagaatcacaaagcaaaatggtagaagtaaataaaatacatcattaatcacatacacaaaaaatgtattcagggccaggtatggtggctcacacctgtaatcccagcactttgtgaggctggggcagacggatcacttgaggcaacaagtttgagactagcctggccaacatggtgaaaccccatctctaccaaaaatacaaaaaaaaaaaaaaaaaaaaagaagaagaagttatccaggcattgtggtgcacgcctgtaatcccagctacttgggaggctgaggtaggagaattgcttgaatccaggaagtggaggttgcagtgagctcagattgcaccactgcactccagcctgggtgacagagtgagactccctctcaaaaacaaacaaagaaaaaatgtattcagaggccaaatacttcttaccacctccatagctgccacccatatcttaccctcctcctagggtttggagttcctactcctggccccacaatctctccccgtcatgcagatagagggactctgggaataaccaagtcaactcaactccctctgctgctcaaaactttcctgtggctccatctcactcaaagattattttgctcattttttttttgtttttttttgagacagggtctcactctgttgcccaggctggagtgcagtggtgcaagtcatgactcactgcagcctagacttcctcggctcaagccatcctccaggcctccagggctaccacaacccagccaattttttgatagagacgaggcctcccttattgcccaagctggtcttgaacttatgggctcaacttatctacccacctcggcctcccaaaatgctgggattccaggcctgagccactgtgttccgccaatctcattcaaagtaagagccaaagtcctcactgtggtccagcagactctgcaccgtctgcttcttgttccctctctgacctcacctcccctccaccccccacacgctcctctgcagcaacacggatctccttgttgtttctctaagatccagacatgttcccatcccaccccaggaccttggcactggctgttccctctgcctaggggactctttccactaggttcagtttctctttttttttttttttgagacggagttttttcactcttgttgcccagactggagtgcagtggcacgatctcggctcacagcaagctcctcctctcaggttcaggcaattctcctgcctcagcctcccgagtagctgggactacaggcacccgccaccacccccagctaatttttgtattattagtagagacggggtttcaccatgtggccaggctggtctcgaactgctgatctcaagtgatccatctacctcagtctcccaaagtgctgggattacaggtgtgagccaccgcgcctggcccccttggctcagtccctcaccaccagcagaagaatggataaactgatcccacagtggcctgcaatgtgtgtgtgctgcaatgagaataacctgtaactgcacacgacaaccaggatgaatttttttcacggtgctgactgaaaaaagccagatgctaaaaagaacatattttcagattgcatttacatgaattcaaaacaggcacaaccaatctatgctgtcagaagtgagggtgataatgaccttggagggagggcaggtgataagggagcgccgagggggcttctggggggctggagatattgcttcttgggctggtggctggtgacacaggtgtgttcaatcggtgataattcctccagcggttacacttacggtttgtactttcctgaatatgggtctacttcaagaaaccactgctgaaaacgaggagctgcacccaccacccagtgtcccctccatccagtttaagcaacaggacattctcagccccccggggtccctccctcccaatgcaatgtgcttttatgtcttcaaggggcctggccaccaccttggttgcttcccccagcttgctatgcatgtcaccccacgcatgttccaggcagctccacagaggtccccagagagaaggcaggctgtgggtgggaggaagggcaggggtgggggacgtggcttcccagcggagcccgggcagggggaggaaacatttctgcaacaccccacaccaagtcctgacttcgggggggctttgcagggtgaattctaagtgcccagggccccatgtgaaggggtcaactgtgtctcactctgtgtctgtctctctgtctgtctctcttcctgtttcctccctccctcccagtctctctctcctcaagaagaaaaaaactcacaactatttacataacaattttatatcagactgtaacccaaaaacccaagttccaacttcgaatttttcaataaactttgaataaatagtagtgctatttttctttctttttttttttagtactgtaatgtttacttttaaatttaatttttactggcagactttacgtatatgaggttcaagaaaagaaaatctccactgtttacatttcttttctgactattaatattgttcatttcatttcctgattattactggcaataattttgtcctatggggaagggaggcgcttggcaggcctcgagttatcctttgagacatgggggtctgtggtcagatttagaaagtgcttgtgggtggctgggtgggagtgggtcatgggagacataagggcaggctggagtccagggaggaggccggccgggcagggacccaggcagcggagatggacagggccatggagaatctgggaggcgcaggccctggggactgtggattggggaaggagataattttattttattatatttttttgagacagagtttcagtctgtctccaagactgtagtgcaatggcacgatctctgctcactgcaacctctgcctcccgagttcaagggattttcctgcctcagcctcccaagtagctgggattacaggcacgcaccctcacacccagctaatttttaatatttttggtagagacggggtttcaccatattggccaggctggtctcatactcctgacctcaagcgatccacctgccccggcctcccaaagtgctgggattacaggcatgagccacgacgtctggcctaattttttgtatttttaggagagacagggttttgccatgttggccaggctagtcttgaactcctggcctcaagtgatccgcacacctcaacctcccaaagtgctgggattacaggtgtgagccactacgccccgccaagggaaggggagaatttgagtgctattgaaggtagaaaacacagaacataggctgggtgtggtggctcatatctctaatcccagcactttgggaggccaaagtgggaggctggcttaatcccaggagttcgagatcagcctgggcaacatagtgagacccctgtctctacaaaaaattaaaaattagccaggcatggtggcacccacctgtactcccaaggctacttaggaggctgaggtgggaggatcgctggatcccaggagatctgaggtgagccgtgatcatgccactgcactccagcctgggcagcagagtaagaccctgtctccaaaaataaaaaataatttaaaataaagcgcggaacactgtcaggttgtctgtgggggagcagcgggcaggcgaccaggagggctggctgctctgtgcagggctagtgcctgggttgggatgactcggcctcagagctgtaaataaagaaggaagagggccgggcgcggtggttcacgcctgtaatcccagcactttgggagggcgaggtggactaatcacctgaggtcgggagttcgagacaagtctgaccaacatagagaaatcccatctctgctaaaaatacaaaattagccgggtgtggtggcacatgcctgtaatcccagctactcgggaggctgaggcaggagaatcgcttgaacccgggaggcagagatcacagtaagccgagatcacaacactgcactctagcctgggcagcaagaacaaaactccatctcgaaaaaaaaaaaaaaaaagtagaagaaagaaagagctgccacagttgagagcttcctggatgcctttgttaactcttggggttttcacatacccatcttacagatggggaagctgaggctcagagagaggaaggcccaagtggaagagcaagcctggagcccaggtctcctcctgcctaatcctgggcttttgctggtggactcccgcccaatcttgaataacttcaggccttaaacaacctcccacgattgcttttcctcccattagaacaataaatgcagatacaaaaaccaactatgcttgtctacaaagcccaagagaatttttgaagtaataaaactgtcatgaatgcagactgtggtgattacatgacttacgaatttttcaaaactcagaatcgagccagatgaaatgatcctgcctgcaatcccagcactttgggaggctatggcaggaggatcatttgaggccaggagttcaagaccagcctggccaacatggtgaaaccccgtctctactaaaaatacaaaaattagctgggtgtggaggcacatgcctgtaatcccagctatttcagcagctaaggcaagaaaattgtttgaacccggaggctgaggttgcagtgagaaatgatcgtgccactgcactgtagaccctgtctcaaaaaccaaaaccaaaaccaaaaaaagaaaaaaaaacccttaagaatcaggattatacacgagcacacgcacactcacccataaattttaccatttgtagaaaagaagaagaaaattcaaaaccaaatacaatgaatgtactttctctggattccaattcacaccaaacaactgtaaaaatctgtttttgagacaattggggaacacaaactggcttttaggagatattaaggaatttcggttaattatgctagacttgataatgccattgtggttgggtaatgcccacataccatgccttggctgggcgtggtgactcacacctgtagtcccagcattttgggaggcccagatgggaggattgcttgagctcaagagttcgagaccaacctaagcaacatagtgagacctcatctctacacaaaattttaaaaaacattagccgagtgtggtggggtgcgcctgtaatctcagctactcaggaggctgaggtgggaggagtacttaaacccaggagtttgaggttgcagtgagctgagattgtgtcactgcactccagcctgagcgacagagcaagaccgtcaaaaaaataaagaaagaaaagaaaatgtaccctattcttctcttcaaggtgctcattgaagtatttacaaatgaaacaacataatacctctcacctgtaattttttaaaatttttatttattaattttttagagatggggtctcattctgttgctcaggctggagtgcagtggcatgatcacagctcactgtaacctcaaacttctaggctcaagtgatccgcccgcctcagtctcccaaatagctgagattacaagcactggccaccatgctttgctaatgttttaaaaattatttttgtagacacaagactatattgcccaggctggtctcagactcctggcctcaagtgatcctcccaacttggcctcccaaagtcctggaattacaggcctgagtcaccgtgcctggccaatttttttttttttttgaggtggagtctcgctctgtcgcctaggctggagtgctgtggcctgatctcggctcactgcaagctccgcctcctgggttcacgtcattctcctgcctcagcctcccgagtagctgagactacaggcccccaccacgcctggctaattttttgtatttttagtagagacggggtttcaccatgttagccgggatggtctcgatctcctgaccttgtgatctgcctgcctcggcctcccaaagtgctgggattacagacgtgagccactgcgtcctgccctgcctggcctattttttatttttatgttttttacagacagggcctcactatgctgcccggactcgtctcaaactctgggctcaagcgatccttctgcctcagcctcctgagtagctgggactacagggtgtgattttttttcaagtattcaaaaaaatggggaggggaaagaagatgaaatggcaaaatattgatggttcttgaacctgggtgatgagtatatgtaagcttattgtctcttgactttttgtgtctgtttgaaaattttcatgatataagagtttaaaaactgaaaataaaatttattgaaggagagtttgggccgggtgcaatggctcgcgtttataatcccagcactttgggaggccaaggcaggtggatcacctgaggtcagaagttcaagatcagcctggccgacatgacaaaacactgtctctaccaaaaatacaagaatcaggctgggtgcggtggctcatgcctgtaatcccagcagcactttgggaggctgaggtgggtggatcacaaggtcaggagttcaagaccagcctggccaagatggtgaaaccccgtctctactaaaaatacgaaaattagccaggtgttgtggtgggcgcctgtaaattccagcaacttgggaggctgaggcagagaattgcttgaacctgggaggcagaggttgcagcgagccgagattgcgccactgcactccaacctgggggacagggcgagactccttctcaaaaaaaaaaaaaagaaaaagaaaaagaaaaattagccaagcgtggtggcaggcacctgtaatcacagctactcgggagctgaggcatgagaatcgcttgaacccgggagacggaggttgcagtgagccgagatcgtgccactgcactccagcctggggtatagagcgaggctctatctcaaaaaaaaaaaaaaaaaaaaaaaaaaaaaaaaaaggagagtttggcgttcatcaagcaacatttggaaactacagagaactagcaaggcaaagacgcccctcccatccctaagtcctgtaccactatggttgttgacattttgatatatttcctttcagccttttctattctctgtgagctttttaaatgcgtgtgttgtgtgtgtgcacgtgtgtgttttacataactgtgtgagcaaattgtttatacagccctgttttttcccctcttaaaatgtaagctgttcccctgttaaaacatctttggataaacacaatctctaatgtttgcactatgtttattcaaaagggcagcattgccagaggttgaagctgtttccaatttcctcccattataaataatcccctcatggacctccttgtgtgtcccagaggagggattcttgggccaaagggtgcggaccctttggcagagctcatggtcaaaaatctcggcagagtttcagcctgacccgaagctaagatgacctcatacggttaaagtgagattggactgctatttatttcctgaacgtttgattcatgactcaggcttgtcaggggatcttttttttttttttcttctgtatgtgcttggttgcaagaaacagaaatccattcacactagctcacgtcaaaagggcaagagaatcgcttgaacgcgggaggcggaggttgcagtgagccgagatcgcgccactgcactccagcccgggcgacagtgcgagactccgtctcaataacaaacaaacaaacaaaaaaagggcggggggtgttgtatccttcagcaagtaaagctcatattcagcttggactagctgtctgcggagcatgttgttggggtatatctaggctatgttgattgttgaaatactgaattatttccgtattggttggtaaatcattctgtctcaagtcgctccaatgacgtcctccaccaaggccactctagctgccctggtccctctcccaggacttcccagacctctccacaatgcaggaagtaaagggtcaatatcgggcacagaagtgaaccatgctgctcggtcagtgcccaaagtattggttgtgaaattcattttttcttttcttttttttttttttggagacaaattctcactatggaactcaagcgatcctcctgccttggcctcccaatgtactgggattaaggtgtgagccactgcacctggactgcttgtaaaatatttgatgattcgcctagatgcaagtaccagaacagctgactcaaatggcttaaattgtaaggggaatctgtggctggaaaatccacacttgtgctggcttcagccaaagttgacacaatggctcagccatgtcaccaaggactttcttttctttctttccttctttctttcttctttctttttttctttcttttctctctctttctttctctctctcttttttttttttttttttgacgtagtctggttctgttgcccaggctggagtgcagtggcacaatcttggctcactgcggcaacctccaattccccggaattcaagtgattctcctgccttagcctcccgagtagctgggactataggtatgtgccaccacgcccagctaatttttgtatttttatttttttatttattatttttttaatcattcttgggtgtttctcgcagagggggatttggcagggtcacaggacaatagtggagggaaggtcagcagataaacaagtgaacaaaggtctctggttttcctaggcagaggaccctgcggccttccgcagtgtttgtgtccctgggtacttgagattagggagtggtgatgactcttaacgagcatgctgccttcaagcatctgtttaacaaagcacatcttgcaccgcccttaatccattcaaccctgagtggacacagcacatgtttcagagagcacagggttgggggcaaggtcacagatcaacaggatcccaaggcagaagaatttttcttagtacagaacaaaatgaaaagtctcccatgtctacctcttcctacacagacacagcaaccatccgatttctcaatcttttctccacctttccccattttctattccacaaaactgccattgtcatcatggcccgttctcaatgagctgttgagtacacctcccagacggggtggtggccgggcagaggggctcctcacttcccagtaggggcggccgggcagaggcgcccctcacctcccggacggggcggctggccgggcggggggccgacccccccacctccctcccggacggggcggctggccgggcagaggggctcctcacttcccagtaggggcggccgggcagaggcgcccctgacctcccggacggggcggctggccgggcggggggccgacccccccacctccctcccggacggggcggctggccgggcagaggggctcctcacttcccagtaggggcggccgggcagaggcgcccctcacctcccggacggggcggctggccgggtggggggctgacccccccacctccctcccggacggggcggctggccgggcggggggctgacccccccacctccctcccggacggggcggctggccgggtggggggctgacccccacctccctcccggacggggtggctgccgggcggagacgctcctcacttcccagacggggtggctgccgggcaaaggggctcctcacttctcagacggtgtggctgccgggctgaggggctcctcacttctcagacggggcggttgccaggcagagggtctcctcacttctcagacggggtggccgggcagagacgctcctcacatcccagacggggcggcagggcagaggcgctccccacatctcagatgatgggcggcctggcagagatgctcctcacttcctagatgggatggcggccgggcagagatgctcctcactttccagactgggcagccaggcagagaggctcctcacatcccagacgatgggtggcccggcagagacgctcctcacttcccagacggggtggcggccgggcagaggctgcaatctcggcactttggggggccaaggcaggcagctgggaggtggaggttgtagcgagccgagatcacgccactgcactccagcctgggcaccattgagcactgagtgaacgcaactccgtctgccatcccggcacctcgggaggccgaggctggcggatcactcgcggttaggagctggagaccagcccagccaacacagcgaaaccccgtctccaccaaaaaaatacgaaaaccagtcaggcgtggcggcgcctgcaatcccaggtactcggcaggctgaggcaggagaatcaggcagggaggttgcagtgagccgagatggcagcagtacagtccagctttggctcagcatcagagggagaccgtggaaagagagggagagggaaaccgtggggagagggagagggagagcgagagcgcatcagagtattttaacagcagaattgatcaaacagaagaaagaattagtgagtttgaagacaggctatttgaaaatacacagtcaggccgggcccagtggttcatgcctataatcccagcattttgggaggctgaggtgggcggatcacctgaggtcaggagttcaagaccagcctggccaacatggcaaaaccccgtttctagtacaagtacaaaaattagccaggaaatggtggcatgtacctgtagtcccaactactcaggaggctgaggcacaagaatgacttgaacccaggaggcagaggttgcaatgagccgagtttgttccattgcactccagcctgggtgacagagtgaggctctttaaaaaaaaaaaaaaaaagtccaggcgcagtggctcatgcctgtaatcccagcactttgggaggcggaggcgggcaaatcacctgagatcgggagttcaagaccagcgtgaccaacatggagaaatcctgtctctactaaaaatataaaattagccgggcgtggtggcaaatgcctgtaatctcagctactcaggaggctgaggcaggagaattgcttgaacccaggaggcagaggttgtggtgagccaagatggtgccattgcactccagcctgggcaacaagagtgaaactcttgtctcaaaaaaaaaaaaaaaaaaaaaaaaagatgaaagaaagaaagagaaagacacagagacaaaaaaagaagagaaagaaaaagaaagaggaagaaagaaagagagaaaagaataaaaaaaaagaggaagaaagaaaggaaagaaaaaaagaaaagagaaaggagggagggaaggaaggaagaaaggaaggaacgaacaaacacagtcacaggagacaaaagagaaaaagttttttgtatttttaatagagaccgggttttaccatgttggccaggctggtcttgaactcctgacctcaagtgatctgcctgccttggcctcccaaagtgctgggattacaagcgtgagcccccgtgcccggccagaccccatttctcccatttctttttatctctctgctttatcttttccagtggaagctcccaagatgactacctccagcctctggccacagggaaccttcttcatatcccacaagcaaaggagagcacctttggctcaggtttcctgccaaagtaatgaggctaactctgattgggccaacagagggcacgtgttcatgcaagagccaatcactgtgatcggagggacagaaggaaaaaccataatggccagattggctgagccaagtcacatgttcctcaaatagtaaggtgagtggctcacactagggctgcaggagccacacctgggttcaatttccattccaaacaaatttctgtcttctctgccctgtttcccgtcagtaacatagagataatgaaggcactcatatggtagagttcccgtgaggattaaatgagttagttaatgcaaagcactgagaatggtgcccatatacagaaagcgttcaaatgttagcttctgttatcgtcattacatggccattctcacctcttaaggctgcttttctttgcaagctccttatgctccacacatttccctctttctagttactattgcttggtaacaaatcactccaaaatatggtggcccaaaacaacaacagtcatcctattatttttcactgtgtctgtggtcagagttttgggaaggacccaactgggcagttctgacttggaatttcatatggttgcagtcacttggcagctgaaactggaacagggaagcagctgggggtggatggatctctctctctctctctttctcttactctctccccactccatgttgtctcagggcttctcaatgtggtctctccacgcgaactggtttgggctccctcacatcatgacagcctctgggcagttggacttacatggcagcttcggcatccagtacaagtgttttatgaaagtagcagccgcgactgggtgcggttgctcacgcctgtaatcccaacactttgggagcttgaggcaggtggatcacctgaggtcgggagtccaagaccagcctggaaaacatggtgaaatcccgtctctactaaaaatacaaaaattagctgggcatggtagcacgggcctgcggtcccagctactcaggaggctgaggcaggagaatcgcttgaacctgggaggcggaggttgcagtgagccgagatcacgccactgcactccagcctgggcgacagagtgagactccatcgaaatgaaagaaagaaagagaaagagagaaagagagaaagaaagaaggaaggaaagaaagaaagagagagaaagaaagaaaggagggaaggagggagggaaggagggaaggaaggaaggaaggaaggaaagaaggaaaggaaggggccttatctcttctgatctagccttggaatcatgcagcattacttctgccacatagtcttggttacaagcaagtcacaaactgcctagatgtaaggggagcttacacaaattccacttcccaatggaaggggtatcaaagttctagaggaatatatgggctgggaaacattgttgccaccatctttggaagttacatctggcttttactggtactgatttaagacccacctctatacagcctgtgcccaataacatccacctgggcacagctccaactccctgttctaaacagaaatagtttattgagaaatctcaatcccttgggatcaaaaacatgacagtttccatttgttctgcagtgactgctctctacctgctatctattgttttccaagactatgatccaaaatcacagcatccaagactgtgtcttttttatttatttattgttttcgagacagggtctcactctgtcgcccagactgtagtgcagtggcgcaatctccactcaccgcaacctctgcctcccaggctcaagagattctcctgcctcagcctcctgcgtagctgggattacaggtgcacaccactactgcctggctaatttttgaattttcagtagagacagggtttcaccatgttggccaggctggtcttgaactcctgacctcaaatgatccacccaccttggcctcacaaagtgctgggattacaggcatgagccaccacagctggccccaagactgtgtctttattattattattatttcgagacagagtctagctctgtctcctaggctggagtgcagtggtgcgatctcagctcactgaaaccttcaccttgccagttcaagccattctcgtgcctcagcctccggagtagctgggattacaggcacgcaccactacacccggctaattttcgtattttcagtagggacggggtttccccatattggccaggctggtcttgaactcctgacctcaagtgatccacccacctcggcctcccaaaggtggctcacagaagtgagccaccacgcccggcctgtctattatttttatttttaaaaataaatgtattgttaatttcctttttcctgttggataaaggctacagggaaacttaatgacaattttgctagagtctttaatatttctctcattttcattcatttaaaaacatagccttcaggccaggcacggtggctcacacctataatcccagcactttgggaggccgaggcaggtggatcacttgaggtcaggagttcaagaccagcctggccaacatggtgaaaccccgtctctactaaaaatacaaaaatttaaaaattagccgggcatagtggcatgtgcctgtagtcccagctactcaggaggctgaggcaggagaatcacctgaacccaggaggtggaggttgcagtgagctgagatcgcaccactgcactccagcctgagcgacagagtgagactcggtctcaaacaaacaaatacacaaaaaaacccacaaagttcatggggagggaaaggtgtagcctctcttgagaactttcctctctcattttccccccaaacaggatgatgcttcctttctcttctctatccttttctggacagccttgggtcctctcagtaacttatttgggtaagtggctggttataatggcagtgacctcgaacttaggctctggggtagttggccacttttgtcctcagttttgggcagtagtagcaattctggaagttctgggaaaaatccaatttgacatcatagtacgaacctgaaggaaaggtcttgatcccaaagagctctcggcagctcatggctgtgactgtcatccagggcctgggcctggggaaatgtttggggatctgtgggatcctttagggactgtcacagtgactcgggaaatgttgctataggcaactgttctggaactttttggtcttaggactcttttacattcttaatagtatcaaggaccccaaacagcttttatttgtgtgggttataacttttttttttttttgagatggagtttcattctagtcgcccaggctggagtgcaatagtgtgatcttggctcactgcaacctctgccccacaggttcaagcaatcctcccacctcagcctcccgagtagctgagactacaggtgtgcgccatcacgcctggctaatttttttgtatttttattagagacagggtttcaccgtgtcggccaggctggtctccaactcctgacttcaggtcatccatccgcctcggcctttcaaagtgctgggattacaggcatgagccactgcgcccggcctgtgtgggttatagctattgatatttaccatattagaacttaaaactggccatttaaacaaattttttattattgattgatttttgagacagggtctcaccctgttgcccagagtggagtgcagtggcatgatcacagctcactgcagcctcgaactcctggcctcaagtgatcctctcgcttcagctttctgagtggttgggactacaggtgtgcaccaccacacccaactaatttattgatttttttgtatacacagtcttgctgtgttgcctaggctaaaactgacaatattaaaatccagccatccacaagcacacactggcagagcaattatgtcatcacatgtcatggagccattgtatgctcataagtgaatgagattgaaatacgcaaaaaaagtcctggaattattatgaaagtaattttggccgagcgcggtggctcacgcctgtaatcccagcactttgggaggccgaggcgggcggatcacgaggtcaggagatcaagaccatcctggctaacatggtgaaaccccgtctctactaaaattacaaaaaaaaattagccgggggtggtggcgggcgcctgtagtcccagctactccggaggctgaggcaggagaatcgcggagcttgcagtgagccgagattgcgccattgcactccagcttgggcgacagagcaagactccatctcaaaaaaaaaaaaaaaaaagaaagtaattttaactttgtggacaaagtctcagggacctccaggaaaccctggaccaaactttgaaacttgctctaaaagcatttgtaagcctgggatggttaggtatgttcaacgtgcagccatgtaggagatagtgcatgtcaaaagggcccctttggatgggttaatatcactttggttcagttatctgtggcctggaaggggtcccttgtgtacaaacaaagctggggagtaggagggaagaatttttttttttttttgagacagagtcttgctctcgtcccccaggctggtgtgcaggggtgtgatcttggctcaccgcaacctctgcctcccaggttcaagcaattctcctgccttagcctccctagtagctgggattacaggcacctgccaccacacttggctacgttttgtatttttagtagagacggggttttgccatgttggccaggctggtcaaccctgacctcaggtgatccaccctccttggcctcccaaagcgcagggatttacaggcgtgagccactgcgcctggcccaggagggaggaatcttaaccataatgctcatcttgtactatctactggaaaccctaaaaatacagagaccctggagccactttctgggttctgctccccttcattgctttctagctgtgtgactttgggccaagttccttaaccactctgtggctcagtttctcttctggaaaatggagacaataatagtatctgcctctcagcgttgttataagagttaccttggcacacagtgttatgtgggtgtttacgctgagtattactgttattacagtaatcattcaaatccaagaagccatcaaaggtaagatgcattgttttttattttattttattttattttttatttttattttgagacagagtcctgctctgttgcccaggtgggagtgcagtggtgcgatctcagctcactacgacctccacctcccaggttcaaacaattctcctgcttcagcctcctgagtagctgggattacaggtgtgccctaccacgcctaagttttgtatttttagtagagatggggtttcaccatgttggccaggctggtctcaaactcctgacctcaagtgattcacccgcctcagcctcccaaaatgctgggattacaagggtgagccaccacacccagccaagatgcattgtcacttcaaatccccaggggagaaaaaacagctgccagttaaactatgacacataatcatttataagacacatcctgatttccaagtcattgaaaaggggtggggaggataaataagtcaattaaaaatggttttattcggcctggcgtggtggcttacgtctgtaatgccagcactttgggaggctgaggtgggtggatcacgaggtcaggaagttcgagaccagcctggccaacgtggtgaaaccccgcctctactaaaaatacaaaaaattagccatgcctagtggcacaggcctgtaatcccagctactcgggaggctgaggcaagagaatctcttgaacccagaaggcagagattgcagtgagccaagatcgtgccattgcactccagcctgggtgacagagcaagactccatctcgagaaaaaaaaaaaaaaagatggttttattctggaataggagagtatttaaggaaagaaaataaaaaataaaggaaaaaaagaaattttaaaattaaaaaaaatgatttcatgtgtacagaagaatttagcaacaaggatgtccaccacagcacttgtcataatggcaaacctgctgaaaccccaaccattatggattaactgcacaagttaagagagagccacaaaatattgtgactgaaggggttttcaaagattgttccaaaaccctggggatcctcaaaagtgaatcaatttctctctttcataatctttttcatcttcactctcctatgagtgcataaagcaaaaaataataagcaggtgacttctaaaaagaaaaaacctctggaaactatgcctcaaccccattctagagcctgctgggccactgctcagaaaaggaaatgtgtgccccaggctgacccactcttaagacaacccattctccacatgcctctgccttcagttacacagctgtacccagagaggggtcttgtctttactcagctgtccatccaccctccctgtgttgcaatgaatacatccctggtatcttctgtgcctggccccagcccaccccctcctcagagctccagccacacattccagtgccttcgagactcacctgctttgaaaggtagatccttacattcaattttcttgttgaaatacttcatgtggtttcttttttcttgacaagcctctgaccaacacttggtggtcattcttaaaccgttgatttttccccttcacacctattcccctccacgatcacaatcttcccagtctcaaaaatgtctctacctgggacctcaagccagaaacccaggcaatatggaggcacttcctctcctcattccacatatgccactcatggacaattcctgctttcctctaaggcagatgcttaccacacccctacccccacccttctatttagaaaatttctaaacatgcaaaagaattgcaagaaaagtagaagatataataatatactgtggatatggattcactaggtttttgcagttttttgtttgtttttgttttgagacggagtcttgctctgtcacccaggctggagtgcaatggtgcgatctcagtgcaagctctgcctcccaggttcaagcaattctccctgcttcaaccttccaagtagctgggattacaggcacccaccaccatgcccagctaatttttgtatttttcagtggagatagggttttgttacgttggccagctggtcttgacctcctgacctcaggtgatccgcctgccttggcctcccaaagtgctggattacaggcgtgaaccgtcacacctggccttttgtgtttttgtttttgttttggtttgtgtgtgtgtgtttgtttgtttgtttttgagatggggtttcactctgttgcccaggctggagtgcagtggtgtgatcacagctcactacagcctcaacctgctaggctcaagcgatcctcccttctaagcctcttgagtagctgagactgcaggtgcccaccaccacacccagctaatttttgtattttttgtagagacgggttttcaccatgttgcccaggctgttctcaaactcctgggctcaagtgattccccccaccttggcctcccaaagtgcttggattacaaacgtgagccactgtgctgggcctatttctttgtgttttaagaggcagggtctttctctgttgcccaggtggagtacgatgattcgatcatagctcactgcagcctcaaactcctaggcacgggagaccctcctgcatcagcctcccgagtagcccagactacaggtgtgtgccactatacctagctaatgaaaagaatttttttgtagacatgagttcttgctatgttgtctaggctggtctggaacctccagcctcaggcgatccccttgcttcagtcttccaaagcagtggggttacaggcgtgaaccacctggcctggtctcgctctttctctttcgacatctacattgatctgtagctatctacgtactatagatatctaaaagttatgtaaatgtctacttaagcttataggtatgagctactgtatgctatctaagcttataggtatgagctacaaattgctattgtgttatgaggggaattcaaaaagttgatggagaatggaattaagagataaaaattttaaaaaaatctttatttctcaccataaactccatcaaggtcaaagtcaagacacttttgtaaaccattataccagccatttagtctatccctaaataactgagggtcccaggaatttaatcatgtcagtgcagcctttttacattttctctttctttttttttttgatggaatctcactctgttgctcaggctggagtgcagtggtatgatctcggctcactgcaacctctgcctcccgggttcaagccattctcctgcctcagcctcctgagtagctgggactacaggcatgtaccaccacatctggctaatttttttttttttagtagagacgaggttttgccaagttggccgggctggtctcaaactcctaacttcaggtgatctgcccgcctcggcctcccaaagtgctagcattacagttgtgagccactgtgccaggccttttttttttgttcttgttgcccaggctggagtgcagtggcatgatctcggctcactgcaacctccacctcctgggttcaagtgattctcctgcctcagcctcccgactagctgggattacagtcatgagccaccacacctggctaatttttgtatttttttttttagtagagacagggttttgccatgttggtcaggctggtcttgaactcccaacctcaggtgatccaccctccttggcctcccaaaatgctaagattacaggcgtgagccactccgcccagcccagtctttttacattcttaactgaagaaaaatgggtgcccttcaaagattttaagattaggaaacaaaaagtcagaaggagccaaattgggactgccaagtggatgcctaataatttcccatcaaaacttgtaaaattgctcgtttgatgaggagaatgagcagaagcgtagacatgctggagaagaactctctggtgaagcttcccaggcttatttctactaaagcttcggctaactttctcaaaacactctcataataagcagatcttattattctttgaccctacagaaagtcaaccagcaaaatgccttgagcatccccaaaaactgttgctatgacctttgctcttgaccagtgtgcttctgccttgactggatcacttccccgctcttggcaatcattctctgattacgatttgtctttaggattgcacccgtgaaaccatgtatcatttcccgttacaatccttcaaggaaatgcattaggatctcgatctcacttgtttagcatgtccatggaaagctctgctcttctctgcagctgatctgggtgcgaccgttctggcacccatcgagtggaaagtttgtttagctttaatttcagtcagaattgtgtaagctgaggccgggtgaggtggctcaagcctgtaatcccagcagttcgggagaatgaggcaggaggatcacttgtgtccaggagttcaagaccagcctgggaaacctaatgagacccccatctctacaaaaaatacgaaaatttagtgtcaggcctctgagcccaagctaagccatcatatcgcctgtgacctgcacgtatacatccaggtggcctgaagcaactgaagagccacaaaagaagtgaaaatagccttaactgatgacattccaccattgtgatttgtttctgccccaccctaatgatcaatgtactttgtaatctcccccacccttaagaagtttctttgtaattcttcccatccttgagaatgaactttgtgagatccgccccctgcccgcaaaacattgctccaaactccaccgcctatcccaaaacctataagaattaatcataatcccaccaccctttgctgactctctttttggactcagcctgcctgcacccaggtgaaataaacagccttgttgctcacacaaagcctgtttggtggtctcttcacagggacgcgtgtgacacttagctgaacgtgctggcacgcacctgtagttccaactacttcggaggctgaggtggaaggatcgcttgagcccaggaggttgaggctgcagtgagccacaatctcaccactgtactcagcctgggcgacagtatgagaaccctgtctcaaaaaaaaaaaaaaaaaaaaagaaaaaagaattgtgtaagctgtaccaattgagatgtctatggtgttggctattgtttctgctgttaactgtaagtcctctttaattaaggcataaacaaatttaatttttttctgcaaaaattgatgtggatggtatgccacggtgggcttcatcttcagcatgacccaggctggagtgcagtggcgcaatcacggctcactgcaacctctacctcccagactcaagtgatcctcccacctcagcctcctgagtagctggaactacaagtgtgcaccaccacacccagctaatttatgtattttttgtacggatggggtttcaccatgttacccaggctggtctcgaattcctgagctccaatgatccgctggcctcagcctcccaaagtattgggattacaggcgtgaaccaccacgcccgaacttgtcccttcttaaaacgagttatccatttgtaaatggctgatttctctggggcactgtcaagtttttggaaaacatcaatgatttcatcattcttccacccaagcttcaccatcaatttgatgcttgttcttgcttcaattttagaattcgtgttgctctgataggggctcttttcaatctgatgttttattttagtgtctcaaactaggtcctgttcagacaagttataacaagttagtatgaatttattttggtgcaaaaaaaaaaaattgaactccatgcatagttttttcataatacacattttccatgaatttttggaagacccttctttttctctcttttttttttttttttttttttctgtagagatggtcttgttctgtcacccaggctggagtgcagtggcacaatcatggctcactgcagcctcgacctcctgggctcaagcaatcctcccacctcagcttcctgttactgggactataggtgtgcaccaccacaccttgataattaaaaaaaaaaatttttttgtagagatcggggtgggggggggggtctcactatattttccaggctggtcttgaactcctggcctcaagtgaccctccccaatcagcctcccaaagtgctgggattacaggcacaagccacagtgcctggccaataaatgttttttgaatgaatgaagaaattagtgcatggacatattttcccatcagctattacaataaccagactctgagttccctgaaggcagggcctgtgagtttcattgtgtaccctcagccctcaatagctgataaaaataaatattcagaaaatgcttgtaaaatgaagaagagaatatgtatgggacagaaagtagaccagtggttgcctggggctgggacagggaatagggagcgactgcaaatgggcagaagggatcttttcagagtgatggaaatgttcttgaattggctgtgatggctgcagaactgtaaaatcacccaaaatcagtaaatcacttataataggtgaattttatgacaggtagattatacctcagtaaagctgttaaaacaaaaccagtgttgagggaggaaataaatgttaccttggtaatactgaggactcagtagttatcaagacagctctcttccctgccctcatgaggttttctgtgcagggcggggacgccgacccattatagacagtgacagcctagagccatcacggcgggatggtggggaggggacaggcagaggggtgggaggccaggatgggggaagcccgggcagagaggttgggctggaatggggggcacaggcagaggggtcggggcggggactggtgaggtgcaggcagagggcaaaggggtcgaggtccagatgggagatgtacaggcagacggatccgggccagggcggggaggtacaggcccagttgaggagcataaggaaccataggagcccaaaggaggcgcccgaccagtcagggaggacttcccagaggggtgaatggctgagccagggcctgaagtataatgttcatgaatgcgacagcaatttttttttttttgagaccgagtctccctctatcactggagtgcagtggctcgatttcggctcactacaacctccacctaccgggttcaagcgattctcctgcctcagcctcccgggtagctgggactacaggcgcccgcccccacgtccggctaatgtttgcatttttagtcgagacggggtttcgccattttggccaggctggtcttgaacccctgacctcaggtaatgcacctgcctcggcctcccaaagtgctgggattacaggcgtgagccaccgcgcccagcacaattttaatttttcttaaacacttttcctgccttagcaaagtcttggaggggcggccgcccaggcgccgcgagcgcaagaccacgagggggcgctgcttcaccacgctagaggagcgctcccggcaaccacgtggccccacaggtgcgggaggtcggcgagcgcgcctggagggtggacggggtaggttacggccaggcagcccggggtggcgcgtggccctgcgcagggcagtggaagcagcgggccccagggagcatgagacgccgcgctccgtggggcggtcccagcgctgtgcagcgaggggccagggctgtccccggtcctgcgcggccggctcccggagaaactgtggcctcctgggggtggagctttaaaaaacaaaacaaaacaaaacaaaatcacccaacaggaagcggggtgggggcgcccggctctgtcacccgtggaatgcatcaaaatagcctgcgcggccgggggcggttccgggaaagggggcggccgcgaggggcggggctgcaacggagggcggagcttcccaaagaacgggagagaggagtgcagaaccggccccagggggacgtcctcctgttcccccaaaatgacctcgataggcgtttgtgtgggatggggttcctgggtagggcggggctttccagtgcgatgtccctggtctattcttagcgggctgaaacctggagaagtgggagtgggcggttgatccgggttccagggcctctttggagcgaaaagctccgtggagagccagagtctccatcctgggcgtgggagggaagatgggaaatgggccaagaggagcctgtgggaggtcctccccgggacggcccccttccatctgcatccgcgggaaccgttgtgggggcagctctgagaaaggctgctctgggcgcaaggaagggtggttgaacgaagagatcagtcagggacggggtgggggtgccttgactgtgtcccagatttgctgcgtgcttctgacctcagttccccatccttccagttgctcaaatcctctctgtcccagtcctaggccgtttctgcccctctcacttcctagtggtttgcagaggggaaacactgaggctgcctcttctgtgcctggccctgtgttggcacggggaagtgactgagacgccccagacccccttctccctcacagtccagtgaggcagacagacctgccaccagatagtgacagcccagaatgagtcattgagaggacgggggaggcacaggcagatgggtcagggctgggataggggaggagaggggcctgtaggatccaaggggagagtgggtgctgctgactcagtctgggggggttgaagagccgtctgaacttagaccaaaaaggtaggatggggccgggcgcctgttatcccagcactttgggaggcagagacaagaggatcgcttgaggccaggagttccagaccagattggacaacatagcgagacccccatctctacaaaataatttaaaaatcagttgggcatagtggtgtacgcctatagtcccagctactcaggaggctgaggtgggaagattggttgagcccaggaattcaaggctgcaatgagctatgattgccccactgcagtccagcccgggtgacagcgtgagacccctgcctccaaaataataatagcaaaaatactgggctgggcgcggcggctcacacctgtaatcccaacactttgggaagccgaggtgggcaaatcgctgaggtcaggagttccagaccagcctggccaacatggtgaaacccagtctctactaaaaatacaaaaattagctaggtgtggtggcaaggcatctgtagttccagctacttgggaggctgaggcaggagaatcgcttgagcccaggaggtggaggctgcaatgagatcacaccactgcactccagcctgggcgacagagtgagactctgtctcaaaaaataaataaatcctaatgaaaggataggatggggctcagggccttggaagagggtcaccttctaacaaaaggtatttgaacggagtcctaaagaatgagtagcattcttctgggaagtgctgtgtcaccatgaaggaaagggtgttctaggcagaaagaatgacaaatgcaaaagcttggaggtgagagtgtggcttatctctggcagggtcctctgctccctgcctgggacattcccccaacgtcataccccgacagagctgtcttaggtctcctagtcctggagtccacaagcaggttaatgggatgtaatggaaacgctatagagggcagacccctaggcttgttccctcacagcctgatgcttttttgtttttgagacagagtctcgctctgttgcccaggctggagtgcagtggcgtgatcttggctcactgcaaccttggcctcccaggttcaagcgattgtcctgcctcagcttcccaagtagctgagattacaggcacccaccaccacgcctggctaagttttgtatttttagtagagacggagtttcaccatgttggccaggctagtctcgaactcccaacctcaggtaatccacttgcctcggcttcccaaagtgctgggattaaaggcatgagccaccacgcccagccttttgttttgtctgcttttttagacagggtctcacgctgtcaccctcacaggctggagtgcagtgactgcatcacggaccactgcagcctggacctcccaggctcaagcaatcctcccacctcaacctctccagcagctgggactacaggcgtatgccaccacgcccacctaattttaaaattattttgtagagacagggtctcattatgttgcccaggctggcctcgaactcctgggctcaagcgatcctcccaccttggcctcccgaagtgctgggcttacaggtgagagccacctcagtgcccggcctcagcctgatggtttcacgactgcctttgactttggcccacactaatcaaatgtatcaccgtgggccactgactcaacttccccatctatccagtgggaatagaatattggactgcacaaaatcaaccacctcattttaaagagctataacgaaacaaaatttatatgttatatatttttaaaaatacatcttatagattaaaggactcaagaaacaatagcaagactgtaaaacgttgccacatcaggtgacactttggccagagttatggaaaatgctgacaaaacaagaatttgccagcatgggcaaagatatactgttaccaacccaacttgttaaaatattaatattgagctaattagaagtagtttttttttttttgttttttttttttgagacagagtctcattctgttgcccaggcaggagtgcaatggtgtgacctcaggtcactgcaacctctgctgcctgggttcaagcgattcttgtgcctcagcctcctggaattacaggcgcctgccaccacgcccggctaatttttgaatttttggtagagactgggtttctccatggcggccaggctggtctcgaactcctgaccttaagtgatctgcctgcctcgacctcccaaagtgctgggattacaggcgtgagccactgtgcccagccagcagttcataatatttgttttttattccttgattctaactctgtaaggaatagaaatggggtgattaattttggctcctttaatacccgcctggcaggtgctgagtcagtggtacctgttaccacgctatgactcagaggttatcactcagggacatccttctgactctgtttcagtccatgactcaggaggaaaggttctagggcctcaccagcgccctacacacaccctcgtttcccgaggggcaccattatattcttcctttattggctgtccttgtataatacaaatcttcaagtttagatacaaaaaaaatctggaaataaaagatagaaaagtacccgccaggcaccccttccccttcttcccggacccctccccagcgggcaccgacatgaggtaactgcgcatcttctcctcctcctccctccccgcctcctgggcccccaacttggccctagcccccatgagaccttggcccaaggaagacatgggccccaaagttggagggtgatggaggtgagtacagcattggcagtgaacgcagcgtgtgggcagagggcagcccttagcttgtgctgtgcatggggggaggagacgaccagatttggggtgggcactggtgtggggcccaggagagcccctaagcaagtgtcccccctccatcctgtccaacactggaaggtgggggtcaacagaaactgggaaatggagtgtgaaccaagggcattcagtgggattgtggccaacccctgtgtctggggttggggaagggggcattgccagcctaagtccggcagtgaaatggttcccttagccaggctgggtccgtccctgaattccatcctgttgcaacctgggcgtcacaatgttggttctgtagtggttgtcggggtggttgagggaggggggtgttgagagggtgttgaggggcgcagccccagggagcagggttaggggagaggttgtgcctccacccccaggcgtggggcacctggagatgatggagtgggtggggcggctcgggctacagttcaatctcgaatgtcttttgcaggtcgccagaaaaggggttggagggtttctctacagtggctttgccttctaatgccgcccactgggcctcaaaggggtccaactctggagctggggcaggcgctggctcagggggccagggggccccattggggcgagggcgggcctggctcccaggggcactgggtatggcagggggcgggaaggccccagctttcccaagcagagtggcaggctgaggctggagctgggcggctgagcagaaggcgtttgccaccatctgtgagggtgtgatgcccaccacgggcacccggggcatcggtgggtagcccaagcccgggtaggcgggcacaaaagggggctgcatgtgtgggggtggcaggaacacggccacttgggcaggtgcagcgtcaaagggccccacgggggcggggaaaggctgcagggcaggaggcatggtgggcactggggccactgaggctgcttgctgctgttgctgctgctgctgctgctgctgttgctgttgctgctgctgctgctgctgggccttggccacctgtgacacctcctccagccatcgctcagcctctgaaggtgtccgcttgtgcccaggctggaaggcagctgcagggggcacggagggctcaccccaggcagaagtccctggagagaggagagggacaggtgagggagggggcaacggcttcagcagaagaaccccaggctgggaactggcatggtgtggggatcagagcacggactctggagccagaccgcctgcctctgaatcccagctctgcacctcccgagcttgctgacttcaggcgagtgacttcaccattctggaccacgtaatggttctggagtgctaagaacatacaattctgagcttctaaggccctatgatgagaaagtctaagtaggactgacatcctcctagccccactacccttctgactggtcagtgccaagcctaggattcactattttgttttgtttgttgtctgttcgttttgagagtctcactctgttgcccagggatgccctatctgggctcactgcaacctctgcctcccaggttcaagcaattctcgtgcctcagtctcctgagtagctgggattacaggcgcgcaccattacgcccggctgattttttgtatttttagtagaggcgaggtttcaacatgttgcccaggctggactcgaactcctacctcaagtaatccccctgcctcggcttcccaaagtactaggattacaggcatgagccaccacacccagctggtattcactattttgaatatcacccttgattttctaataccttcagaatgtattgttttaggagttaagattctaagattgcatggatctttctccacatgtataatagtatcctaacatagtaaggtttgacagtttagggttgggctttctaagattctcgagttctacatttacagtgtttgagattctaaggtgcacctgtggttctaggataagcccatggctctaagatgatacatggttctcaaggattccatggttctgaaacgatctctgggctctaaggtgatcccaagattctagcatgagcacatgcctctgaggtgaccccgtggctctacaatgatcccgtatctctaagataattcatggttctaaagtgatcacttgattctcaggtaatcccacggctctaagatgatccttggttctaggatgatcctctggttctaagatgatctgtgtttctaaggtgatcctatggctctaagatgatccatagttctaggatgatcccatggttctaaggggatcccgtggctctaaaatgatcaagggctctgagatgatccatggctctaaggtgatcacatgattctcagataattccatggctctaagatgatccatggttctaggataatcccctggctctaagatgatccctgggtctaaggtgatcacatgattcttaggtaatcccatggctctaagatgaaccacggatctaggatgatcccctggctctaagatgatccatggctctaagatgatcacacgattctcagataatcccatggttctaggctgatcccctggctctaagatgatccctgcttttaaggtgattgcatgattctcaggtaatcccgtggctctaagatgatccatggatctaggatgatcccctggctctaagatgatccatggttctaaagtaatcgcatgattctcaggtaatcccatggctctaagatgatccatggttgtaggatgatcccctggctctgaggtgatccatggttctaagcctgtaggatcccaagacccctggagtgtctgggtagccctggatagaggaggggatacaggagggacatgcagggtgtctgcccagcagaaagcctggctttacctgttgtggcaggtggtggccctggtgctggcgctccagcactggcaaaagatgaactgatctgtgtgcacagagcgttgatgctgtcactgtcgccggcaccaggaggctccatctcaggcactgggaagcagggcaggacagaggtcagcaaacaggcccagaccctgccgcagccccgccctctaccccccgccctcggtggccctctcttctgacctggatcctttcccactgtagtaactaagtggccatgaccgccaaataactgtgcatatgtgtgtgtcacatctgagcggcagaacgactgagttagtgtgtgacatttgacggctgacagtaacagggaccccaaaccaaggacctcaagatttgtgtgtggccacaaaccagaagagttgtctaaaacacttagcaacatatattagtttaaaaatatgcccaaccacgtgcatggcaaggacatgggcccagtctgaatgggctgtggcatggccgctcactggctggggatcatttgtccagctttgggcagagaagtggggtcctgtccaccccacccaggctgatctatggcaaacatcatgagagcagagatacacctgtgccagcaaggcaggagacactgagcaggcatggcggccccgtgagggcttgtgatgagcaaaggtaccatccaaataaacaattaaggactcccatgtgtggtgtgtgacacatgtctgtgatgttttagccaatggctgtctccaagggaccatgtagatgctccagtgaacatcagaactggccgtaggagtctgcaggtgtgctgcgggggcgcccgggtgggacagccaatgtcgacaatgattgtgcatgttcgtccaaacaggaatgcagcttctgagagtgtgactggggtccgggtgtgtggcgtcctgatgcgtgactcccaggtgtgagtgcatctgccgtgtgatgtatgagtgtgtttgcaggtgtgcatggatctgcacatgtggctttggagtttgcataaatctgggtgtgtggtctgtgaaggtgtgtaaatctgagtgtgtttcttttttaaaaatatttatttatttatttttgacacagggtctcgctctgttgcccaggctggagtgtagtggcacaatcttagttcactgcaacctccgcctcccaggctcaagcaatcttcctgagtagctgggactacaggtgcatgccactgcacctggttaacaataaaggttaatttttaaaatttttttgtggagatgagatcttgctgtggtgcccaggctggtctcaaactcctgagctcaagtgatcctcctgcctcagcctcccaaagtgctgggattacaggtgtgagccaccacgtctggccatgtgtgacttctgactctgtgattttggagtgtgtgtgacttgagagtatacctgactgtgagtttgtgacttctgagcatgtgtgacatgtgtgtgggggggtgcaatgtctatgtgagtatgtgaaatttctgtgtggcaagtcacatccaaataagcgtgcagctggccacaggagtgtgaggcttccaaataaagcctggagctcctgccacctctcaggagcacgtgtgacagcctggggagtgtgcctgatgtcaggctgcgttaaggacagcaaatgtgagggtgtgtgatggcccaggaatgctgcaggcatggagggagcgtgcgtcactctcaacaagggttggcatctgctcaccggttaccttttggagcagcccagcctcctggatacagctcaacaccctcccacatcaatccccgaggacataacgggtaggcgatgcagatttggcatccaggagcaagagagtgggccagaccacatgggttcactggctgctggtggggaagacagcccttctgcctgcctccctcaggcaaaaactcagtagcgtgccacctctatcttccttccctatggcagagattgctcttaatttttttttttttgagacaggttctcactctgttgcccaggctggagtgaagtggcgcaatcttagctcactgcagctgggctgaagcaattctccttcctcagcctcctgagtagctgagactacaggcatgcgccaccacaccaggctagtttttgtatttttttgtagagacagggtttagccaagtgatctgcctcaagggatccttgagcccctcttgggctcaagtgatctgcctgccttggcctcccaaagtgctgagaccacaggcatgagccactgcacttggctagacatcacttttagatcatgatgtacaccacctgtctcctttccctggcccatggcagacattagtaatcaaacacaatgcttttttcccccacggagctctttgctcaccttacccgtcacctgtccagacctcatggctcccctggccaagtgctagaagaaacagatccttgtaactccatcttccctccaagtaaaacaggacctttatatctcctctctcttaccaccagccatggcagacaatgccaatcaattatgatgtgctgctccttttcgtgatgggtactgcctctgctcaactctgtgcctacaacaaatgttcctgatccatcactatgcccctgacccctgggatctctgagctcactggtgccctgcatgtcatgtttctactgaccaaattctgggagtctcccctttgggtaaaaacataacactcttgctactctttcttctcccttgcccatgacacacactgcatggagatcatgactgctaaccgatcatgatgtgtgccatctttctcgtttcccttaaccacagcagacattgctaattgatcatgacttgtgatgccttttttgccatcccttgatgctccctgccctaggcagacatttctaatccatcacaatcctcctttcctcagagcctgaggaatacctgtatccttcacctagccagatctcataggtgaatgcttggagggagggagcattaacctgtagtgcttcagtctactcctgagcaaaaacaggccaatggtgttgcttctcttctttccctggcccatggcaaacttccttatccatgcccgacttctttgtccatagccgactttgctaactaatcatgatgtgtgtcatctttctccttttccttaaccacaccagacattgctaactgatcataacttgtgatgcctttctactatcccttactcagagcagacacggcttatcaatcctgatttgtgctatctctttcctctcccttgcccactgctaatcgatcatgacatgttcccactctctctcctttgcccatggcagacagtgcaaatcaatcacagtgtgaaccatctcgcctccatcccttgcccacatcagatagtgccaattgattccaacgccgtttcccactgggcccagggctcacctgtgcccttcacctggaagtcagtgcggcgctgcagcgtggatggcagctcattcagccgtaggctcagctgccgtttgaaaggcgagttcttctggctgagtgctgggaacccacggaaggagccctggcgaaccagctgctccaggggtgcatggcgccgggggatggcggccgcagtggtgcctgcagccacaggggtgcctgcctcacccttctcaccaggggatgtggtggctggtgtcggggacacgtgcccaggctgggcagggccaggagccacagtgggggcagctgctgcctctgctggagacatgggggagatggatggttagatatctcaccatggcatgcaaggcctctcccacctggttctcttgatcattctccaaggctgccttccttgcccagtgagtcctgcccttaagacaagctagtcaaagccctgagatatccctcacccccacccaagtcatgatccccttccccaggaggctcttggaaaaccgtcccccaggctcaccctctgtgtctctccagcttcctgcccctttctgtcttgccctgctgctctcaccattcttccctctaagaccctctatctccctttttgatcacttaacaaacactgatttggtgctggaacaacgtatcaggcattgttccagatgcttttcaagtattcactcattcaatccacacgactacccatggggttgatatgattctcattttacagatgtggaaactgagacccagcaaaggcccagtgtgatgtgcccaagtcctactgctaggaaggggcaggctgactctggaccccatgctccaaatgactgcccgccctgtctccctctgacctgtctctccatatcatgttgtctttctctgtcactgtctgttcccctctgtctcccacctcccagccttcttcccacctcaagtagctcctcccttcctccagtcattctagacatggcttggatgcttcatcctctgagaagctttccagattgttccaggctctcagcctggctccctccactctgagactgttctctgtactctgggaggaaacctgacctccccactcagcaggagaggcaggctcttcaagggcagggctgccctcacccctgccaaaccacaaacacacatctaccctcctaccagggcctccccgagctgcagcctgaatgccatggagattaaactcaggcccagagagaccctcccataaggatgtcgcccagtgctgcttctcccatcgtgacacaatggggcacccatgcaggcctggcccaaggcagtggaaacagcccaggacaggttggaaccaggaaacctcctctgcctccactcactgtgtgacctcaggaagtcccctcccctctctgggctccagtttgccaactagaaacctgggataaacatctcagtgctacctcccaagcctctgagagggtcagtttaggtagtgaatgttaaatgttttggaatccaacaaaagcatgcctggacacagtggttcacgcctgtaatcccagcactttgagaggccaaggtggggggatcagttgaagccaggagttcaagaccagccttgccaacatggtgaaacaccatctctactaaaaatacaaaaaaagattagctgggtgtggtggcacacgcctgggattccagctactctggaggctgaggcaggagaatcgcttgaacccgggaggcagaggttgcagtgagccgagatcgcaccattgcactccagcctgggcaacagagcaagactctgtctcaaaaaaaaaaaaaaaaaaaaaaaaaaaacttagctggacgtggtggcgggcacctgtaatcccagctactcaggaggctgaggcacataaatgtcttgaaaccaggaggcagaggttgcagtgagctgagatggcactactgcattccagcctgggtgacggagagagactctgtctcaaaaaaaagatgttcttttttttccccttacaatccaggatctaattcaggatcacatctcgcatctattaatacctgttaaacctcattagtctcccttaatcaggatcagttcccaatggtaaattctttgtaaattctaagtagtgttttcccaaagaacttaaattcacagtaaaataaataaataaattaattaattaataaataaattaattatatggtgactcaggacatacatacaattatattttaaacacacacacacacacacacacacacacacacacacacagagttttagaacttacaaagtatttaaccatttacctagaaagttagttttaccaagtatgtttcaaactttcttgatggcaatccagagttaagagatatcttttatatggtagcctcttacacacgcgtgcacacacacacacactctctctctcaaataaaagtatcattaaattatatttaacccttatgccattcaatatactctgatattttctatgattctctatttcattgtttttaaattaatttttttttttttgagacagggtctcactctgtctgtcacccaggttggagtgtggtggtgcaatcgcagctctctgcagcctctacctcctgggcccaggtgatcctcctgcctcagcctcctgaggagctgggaccacaggttgcaccaccacgcctggctaattttttaatgatttgtagagacagggtttccctatgttgcccaggttgatttcatttttttaaatgtcagccacatgggctgggcccagttgtccacacctataataccagtgctttgggaggctgaggtgggaggatcgtttgaggccaggagtttgagaccagcctgggaaacacagcaagatcccagttctacaaaatataaaaataaaattagccagatgctgtggcttgtgcctatattcccagctacatggaggctgaggcaggaggattacttgagcccagcagtttgaggctgcagggagctgtgatcgcaccactgcactccagcctgggcaacagaattagacctcaactcagacaacaaaacaaaacaaaaaatgccagccacagtacagcaaattggcttcccaggtcttaatacacaggttgaaaagccctgagaaggccaggcgcggtggctcacctgaggtcaggagttgaggccaacatggtgaaaccccatctctactaaaaatacaaaaattagccatgcctgtaatcctaactactcgggaggctgaggcagaattgcttgaacccgggaggtggaggttgcagtgagcctagatcacaccattgcactccagcctggttgacagagcgagactccgtctcaaaaaaaaaaaaaaacaaacaaaaaaagaaaagcctcgaaaagccccgaattggtggatagtaaaccacttggtgcgcccttagaatattgcccagagaactctttccatggaagttgctttatttatttatttattttttgagacagagtctcactctattgcccaggctggagtgcagtggcgtgatctcggctcactgcaacctctgcctccagggttccagcgatcctcctgcctcagcctcccaagtagttgggattacaggcgtaggccaccatgcccagttaatttttgtattttagtagagacgaggttttaccatgtcgcgcaggctggtctcaaacttctgacctcaagcgatccgcccatctcggcctctcaaagtgctgggattacaggtgtgaaccatggcgcttggcctgaagcatcccctactttgtaaactgttgagtctctgcacctctgcagctccctgccccctgatactgggtaccctgtgcccactctgtgctctgctggcgcttggggcaacacccacctttcttcttgtccggggcctctcgctcagcaggccgcccacccccagacaggcggaaggagccctcgcgggcgaagctggtgcggctggcatcgaaggcggccgtgaccccacattccttctcccgtcgctgttttcgctccaggcaggcggcaaaagcacagcccacagcgtggctcagcctctcgccctatggggagaggatgggcgggggggttagaggcgctgggcagtgcggacaggggccaggggcactgggttatagccgctaggtactgggttgccccggatgagtctctgcacttctctgggcctcagtgctcatctgcaccacaaggaagggctggaaatgacagctccaagtgagagaagccagaaaccaatgagcctgttgtgtggctccacttactggaaattccagaagaggcaaaactaatctatggttctatggtgaaaaaaagtcagaacaggccaggagtggtggctctcgcctgtaatcctagcactttgggaggctgaggcgggaggttcccttgagcccaggaggtcaaggctgcaagcagctatgatggggcaactgcactccagcttgggtgacagagtgagattctgtctaaaaaaaagtcagaatagtggtagtttcctatggggtggggaatgactggaaagtgtatgaggggatgaccgggtggtggcaatgttctagatattgataggggtttcgttacatgggtgtatgcagttgtcgaaattcgttgactgtacaccaaaggcttgtgcattgctatagactaaacgtgtgtgtctctctcagttctaacgctgaagccctcatccacaatgtgctggtatttggaggtgggcctttgagagacaataaaagttatgttagatcatgaggtggggtcctcatgatggaattaatgcccttatttatttattttttttctgggacagggtcttactctgatgctatgctggagtgcagcggcatgacctcagctcactgcaacctccacctcccggcttcaagcgattctcctgcctcagcctctcaagtagctgggattataggcatgcgccaccacacctggttaatttgtgtatttttagtagagatgggatttcatgatgttggtgaggctggactcgaactcctgacctcgagtgatctgcccacctgggcctcccaaagtgttggggttacaggcgtgagccaccatgcccggccgggattaatgcccttaaaaaggaaaaagagacaagagatctcccctccaccttgagaggtgaagatacagaaagcaggcatccatctgcaaaccaggaaaagagccctcaccaagaaatgagccatttgacaccctgacctcaggtatccagcctctagaactgcggcaaacaaatgtttgtcatttaagccacacagtctacactatctggttatagcagcctgaactaagacaatcatatctttcgctttgaagaaaaaaaaaatctggaaacaaatacgaattctacttaatggtgtgcatgctgaagtagtccaatgcctacaaatttgacatacaaaaagaatcagacggtgtgactgcagtcgctcacacctgtaatcccaggaggccgaggcaggcaaatcacttgaggccaggagttcgagaccagcctggccaacatggtgaaaccccatctctactaaaaatacaaaaatctgccaggtgtggtggcgtgcacctgtaatcccagctactagggaggctgtggcaggagaatcacttgaaggttggaggcggaggtttcagtgagccaagatcgtgccactgtactccagcctggggcaacagagcgagactccgtctcaaaaaaaggaatgaaccactgatacaagcagctcacgcctgtaatccgagcactttgggaggccaaggtgactggatcgcttgagtccaggagttcgagaccagcctgggcaacatggcgaaatcccatctctacaaaaaattagccaggcatggtggcgtgtgcctgtagtcctagctactcaggaagctgaggtgggagaatcgcttgaacccaggttgcagtgaggcgagattgcaccactgcacaccagccttgatgacagagagagacgctgtgtcattaaataaattaattaaaaacattgccgggcagggtggctcacacctataatcccagcactttgggaggcagaggcaggcggatcacctgaggtcgggagttcaagaccaacctgacctgcatggagaaaccccatctctactaaaaatataaaattagccagctgtgatggtgcatgtctgtaatcccagctacttgggagactgagacaggagaattgcttgaacccgggaggcagaggttgcagtgagctgagattgctccattgcactccagcctgggtaacaagagcgaaactctgtttcaaaaacaaacaaaaacacaacattacactaagtaaagaagccagacacatattatatgattccattaaatgaaatatccagaataggtaaatccacagagagacaaagcagattagtggttgccagggggctggggtagtggggagacggggtgaattgatgaatggagatggggtctcctttagcggtgatgaaaatgtttcaggactgctaaagtcaatggttaaacaacactgaaaatgtattaaatgccattgaattgtacacttttaaatgattaattttatgtgaatttcacctcaagaaaaaaaaaaagttgaacttggggaattctactgcttaatggttaaaacttccttcagaagtaggaaggaattcatccaacatcacattctttacccacaggagatggtcctgctcttttctggctttcattctcatccccaaatagttttttttttttgttttcttgagacagagtctcgctctgtcacccaggctggagtgcagtggtgcagtcttggctcactgcaacctccgtctccagggttcatgtgattctccccacatgtgattctcctacctcagcctctggagtagctgggatcacaggcgcctgccaccatgcctgtctactttttttgtatttttagtagagatggggttttaccaggttggccaggctggtctcaaattcctgacctcaggtgatctgcctgccttggcctcccaaagtgttgggattacaggcgtgagccaccacgcctggccaatactcttttttttttgagatggagtctcactctgtctcccaggctggagtgcagtggtgcaattttggctcactgcaacctccacctcccgggctcaagtgattctcctgcctcagcctcccaagtagctgggactacaggtgtgcaccaccacacctagctaattttttgtatttcagtagagatggggttttaccatgttgtccagggtggtcttgaactcctgagctcaggcaatccccccgccccagcatcccaaagtgctgggattacaggtgtgagccactgcacccggccctcacgtgaatactctaaattgggaaccgtgagtatactttcttctccagatgaggaaactgggcacacagaggttagtgatgtgcctgaatgcaggaagcttgtaggggtggggctgggatgccagggcatgggagggaagagttggccagctgtggcaatactcacggagtccttcagtgccagaaaacagtggcagatccagcggcgggtagtcccgtcacgacagatataggagaaagccttgtccaggttgcggtcaggagcacaaaaggagaccttttcgatggtctggtcgaccagaagatcctaggaggggccggggaggccaggagaagagtgtgaactctctttcaagtgttcactcaacattctctctgtgtctgctgaaatccagtcctgaacagggtggggacccagcagtcactgagacaccctgtgccttgcctgcagagggctcccaggtcagcgggaagatcagacccatcacgagatgggcagcccagagtcatagccaggatgtgatgaaggaggcccaggcagaggggtcagggccaggaccatggaggcacaggcagaggggtcagggccagcatggcagaagccagcttggggtcagtcaggcaaggcttcctggagcaggtactaactaagaaaaaaagtcaaggaacagtattttgggctgagggaactgccttgcaaaggtggtgatcttgttctgttattaacccaactctcagcatgtcctgggcacctcctagggcagtctctgggctgggggcagcagattcaaggtgagcaaacagatacctagattgtggcctcatagtgcttccttctgactgggcagggtgacaataaacacttaatggctaacattcattgatctgagcagttacgatgtactagaccccatttaaatatatatatatatttttttcccagaaggagtcttgctctgtcacccaggctagagtgcagtggcatgatcttggcttactgaaacctctgcctcctgggttcaagtgattctcctacctaagcctcccaagtagctgggattacaggcacgcaccaccacgtctggctaatttttgtatttttagtagaggtggggtttcaccatcttggccaggctagtctcgaactcgtgacctcaggtgatccaactgccctggcctcccaaagtgctgggattacaggcgtgagccaccgtgcccagcccacatttaaatttttttaaaaattattttgtatagatggagccttgctatgtttcacaggctgatcttgaactcctggcttcaaggggccctcccagccaggcaccatttcaaataacttgcatatgctttctcacttaatggtagggtctattataatccctgtttttctgcgatggagtttagctcttgttgcccaggctggagtgcaatggcatgatctccgctcaccgcaacctccaagtctcgggttcaagagattctcctgcctcagcctcccaagtagctaggattacaggtacacaccaccatgtccagctaatttttgtatttttagtgagatgaggtttcaccatattgccaggctggtctcgaactcctgacctcaggtaatctaccctccttggcctcccaaagtactgggattacaggcgtgagccaccactcccggcctataatctgcatttttcagatgacacaactgagactcagagaggttaaatctcatgcccagggtccctaagctgggatcggagctgaggcagctgctccagtctctctcacccacagcctatgccagttcccaaataatcacagcatttattcctgagttatgacgacagagggagcacacggcatcgtctagaaggtccctgagggagggatgtgcagaggaggcgggaaggtgtcctccgccctgattccagcagggtgagcagacaggccccctggcgtccacccccacaggcctcctaccttggttttgtcgtccaccactcggagcccatcggctgacacccacaggacagacttcacggactttcggcccatctggagggaggcaaggggacaaaggagccgggtcagggtgcctctccctgtctgaccttgccccctccctcatggcagccccctcactcaccgccttcagcttcttcaccgcatcttcacacacgtgcattccccgggactcctctacctccacgtgacccaggtacttgggttggagggaatggggggggggacatgaaacagcacagtaatcactcattctcagtgtccactgagcatctgccatgcagtagacaatattttaagcacatgatgtgtatgcaatcatttattctgcatctcaactctacaaggtggagaccccattcctggtctagacatgcagatggggaaactgaagcacagcacgtagtagtgattccagtctagctatacccctgggccctaacccggcaccgtggtcctcccgagagctagtatttgcatctctgtgcgtgaggactggccacaggccatgcaaagctgctttgcctaccctaaagcagctagaaagagcctgggccagtccccacaatgactgaagggagttagggtacctgagccccagctccctcatctgcaggtgggatgactgttgcctcgagtttcccaggggaaagctcagttgcacactgctgcagttttaataacacaccctttactggctgccttactttcctcactcccaacaccatttcctgcacctcccaaatgaagccgtcacattcaaagtctgcttccagggaagggaacgtaaggtggtggaggggctgtgaccatggtcagtcatcacccagccaggaaggggctgagctccacagtccacgccgtgaatcctgctctccccctcacaggaatgtaaaagcgtagggtatggctaaaccagaacgtccttatcggtagagcgctttgcaaatgctacaccacatgacggcttccaggtaatagtttgctggtacaaaaaaatgtgttctggttttttgtttgttttcaagattgggtatcactctgttgcctaggctggagtgcaatggcacaattaaggctcactgcagcctcgaccttcctggactcgagtgagcctcccacctcagccttgtgagtagctgggactacaggtgcgtgccactgtgcctattttttgtagagacagggtctccctgtgtttgcccaggctggtcttgaactccttgactcaagcaatcctcccaccacagcctcccagtgtgctggaattacaggtgttagccaccactacgcttcaagtttttttttttttttttttgaaacagagtctgctctgtcgcccaggctggagtgcaatggcgctatctcggctcactgcaatctccgcctcccgggttcaagcgattctcctgtctcagcctccccagtagctgggactacaggcgcccgccaccacgcgaggctaatttgttgtatttctagtagagccggggtttcaccgtgatagccaggactgccggcctcacgctttttaacaccaacttcaaacgacttgggctggtgtcccagccaggccgcgcacccgcacagcacagcacagcggcccccgtccccctcgccccgccgcaccctgccgcgcccactcaccctgaccgggaagctgcacgtgcccttccgcaccgcgtcctcgtctgcctgccactggtgcgggcgcgacgcctcgggcacgtaggctggcttcctccgccgcaggctctgccgtaacttgttcatggtgcccgccccgtctggtgacacaggacagtgatgtgggtcaagggtgggggtcagaaggtatggagctcaacggggagggaccagtgctcagggagcatggggtcagataacaagataactggaagcggggttacagggtcagttggcagcgcacatgggatcagcagctcaagtcaggggacagtgaggaaaggagccaacagaagccaggggagtgcgaaagttgggcactggggattcagaaccatggggctaaggggctggaggtctggggtggggggtatggggcacaggcttcagggcattggagggcttcttgtccatgtggtggatgcttcctcattcccagggccgtgaggacacaaagggtgggaaatcagacgtaggagggcatgggggctagagggcatagaagtcaggggccgcacggtcaggggttttaggggtatgagagtcaggcagtggggtgatcagagggcagcagaggagttgggaattgcatgggtcaggggtgcaggagtcaggtgcatggggtatgggggatggtggcttgtctctggaactctgagacacagccattctgtgacaactgtgtctagtccccaggcaaggcttctggggccttgcactgatgactgtcagaggcagggctgtgggtgtgtggagtgggtgtggaggtggccagccactaggacagtcttcactgatcagccatcctgacagtcccaggactgggagcaccaacagcagagggggatgtgtgtgtgtgtgtgtgtgtaagcaagtgtgcaatggtatgttctggaacgctgtctatgaggggctctatatctgagcaggcaagtaatgtctgtgagtgtgtttctgaaggctgtctggaagaacgcatgtctgagaatggtgtaggatagtgtgcatctgtgaatgctgtccgtgagggatgcatccaaaagtgtggttgttgtctgtgagtctgaggccctgaaggttgttgctgaagggcatcgatgtctgagagtggttgtgagtgtgtgtctgctgtctatatccgagagtgccgttgttgtctatgagaacttgtggctcagtgcctgttgcctgtgagggtgtgtctgtgtttgagatgaggctgtcgtctttcaaagggtgtgtccatggctgttatccatgtagctatgtctctgtgtgaaggtgtggctattgtctgtgatgacattgcctcggagagtgcatctgagggatctacaagactgtctgtgtccaagagtgcagctgttggcggtgagcctgtgtgactgtggctgttgccttagagtgtgggtgtgtgggtattgcacagagggtgtatctgtgtgcagtggtgcatccgttagggtgtgtgggaacatgaggttgtctttgagagtgttttcatgagggttatttgtaagggtgtgactgttgcctgagagagtgctgggtgttctttgtgagactgtgtgcatgtttgtacacaaccgtagctccctgtgagagcctgggcccgcgggtgctgtctgtgaaagtgtggctgtcgtctgtagaaatgtgggtctgtgtgtgttgtcagactgtgcaagagtgtgtctcttttttttttttttgagacgaaattttgctcttgttgcgaatgaaggctggagtgcaatggcatgatctcagctcacagcaacctctgcctcccaggttcaagcgattctcctgcctcagcctcccaagtagctgggattacaggcatgtgccaccacccctggctaattttgtatttttagtacagacagagtttctccatgttggtcaggctggtctcgaactcctgacctcctgacctcaggtgatcctcccgcctcagcctcccaaagtgctgggattataggcattgagccaccacgcccggccaagagtgtgtctcttgagagtgtgtatctcagagtctgtatccagcgagcgtctgtggtcacctgtgaatctgggtgttgtctaggaatgtgtgtgtgtgtatatatgtgtgtacattagtgtgatgaacatctacttcagcatgtgttcaagtgtgtcactgcattagcaagtgtgtgtgatctgaaagagatctgtgtgtgtgtgtgtgtctctaaccgtatatctacagatgtgagtgtttgtgactctgcacttgaggctgtaagggtgtcagggtgtgggtctgtgcatgagtggggctctgacagtcgctgaggaagatgcctgagggtgtccactcatgagtgtgattaagcctgtgtgaccgcagggacagctcctctggtcgtgttaggcaagaccacatacccattcagccctgccctgtcccaggctggtcgctcacctggctccgtcctgcaggtttctgggggccccggggccccacagggggctgggggcaggtgccgctcaggcctccggggtccgccctgcccgagtaggggaggagaaggtgagaagtttgtctgggttggggctcagtctgatacttcaccccgactttggacttcggccagccccctccatcttgggctccctgatgagagtcctagttgtcctagcaactgttaccagggagatcagccacctggttccaagggcccaggaaggagtaggtatgtttggggggcatatgttggggatgtgctggcctcaggagagcctcactgcccaaggggatgctgtgagagtggccttgccctccagatgcatgtgcagggctacacacatacgcagccaactcatatctacaggtgtccctagcatctggccacagctttacacacttggttacacatagacgcaatcacagctacacacctcagatcgcagatacacagaaacagtcccaaacccagaaagctgccactgtaaacatctggccgcatattcatgttcggacacacacagtctctactacagacatttgtccacatacatgcagcatgtcctggcccactcagttcccaccgcagacacctggtcacaccacccactgaaatttggtcacttccacattctcagccacatacaaagaacggggcccagacaacccactagagccgcacatgcgtggccacacccagtgacagctatgtttcctcaggcacccgcccaagatactgacgtcacaggcccacccagatagaatcacacccagagttcacccatttgctgacccagtcccacacgacacaatcgcagctatatacacttgttacacgtatctccactgctgcacactgacatctggtcacagatgcacacggacagacacacatttggtcccacggagaccacatgcagcctcaaccagaccagtcacaccaacacactgtttttggccacacactgtcacgtggtcacacatactcagtcataggtgctcaaatctggtcacagcatcagtcacacagtctattgtgacagccacactcatagggacagtcctctatacacaaccacatacagaggtactgatggccacagcatgcaaccacccacaaacaactgtccccaaggatggcctccctcaagacacagccatggtggtcctataggcatggccacagcatcaatgtccatgtgacccagccacctatcatggtcataatcccgtcacccagtgtccatacacagctgtaccatgtcactccaatgcagcgaaacatatagcctttcttcatgcaggcacacaagtcacacagacaagtatgtggccatatagaatcacagccccgtgtggacaggtgcacaaagtcacaagccccacctacacacatatctcacacatagagacataagcacacagttttagtttcccatgtcacaagtacacagtccagtgtatgcacataaatgcagtgaccaggatgtggcatttatagctgggtttacacagaagacacaggtcctgacggagccatgtgcacagtcaggggccaatctcatcaccaaatcacacattctaacacaggtagtccagcacatacacacagagacaaaaacaggcacacagctacagaccccacactctcacagatgatgacatagacacagacatctatagtcacccagggtcagacatgcaggtcaaacacaataatatggaagccataatcatatacacacccctacaaacataatttcctggcaccagcacggagacacatccacagctttagtcacacacaaataatccctctaaatagccagggtttcagacaccaagtcaaatacataacccaaatcacacatgcaaggctagaaatacacacaatcactcgttatcacacacactgctagatacagtcatttatattaatacaacctcagtcacacactcagacatggttctgcatacgcaaccactgtcatacacaatactgtcacacaaccccagtcacacagatacaatgtgacttcagacacaatggcagtcacacaggcagagttgcacagacaggtgtgtgtcactcacgtatataaaatcaggtagagacacaactataaacattgtcagtcactgggagggtcacacatgcacatggagccatagacaactccactcacacacagtcacaactccacccacgtcctgtcagtcacacgcatgcccacccccagactcaacacatactgtcacatacccagttatagttaccgaggcatacaaacacagggtcacaaaagacacaatcacagacaaccacagtcacaaccatgcacacctccaaacacagacagactaaaaagtacaggattctgcacagtgagcagctgtcacacacacatacacagtcacacagatactagggtcacagacacaatcatagacaccaccacaagcacacacacacgacacaggattcctcagtcaccagctgcagcgtacgcgtgcacacacacacacacatacacagccacagtcacacaaacacagggcacactcctagccacctccccatcgcttgcttccccccttccccccaggtaccacacacaaagccgccgtcaccgtcaccgcagacactgcagacagacagggctgcacccggtccctggggagccgcccccagcccagcctgtatcctggagcctgagggccaggtccaggagggggaagcggtgcattgtctgcgggtggggccactcttggacagctgggcagccctggggacaaagggggtggcctagggatcctgtgccctgggacccatgaccaagccagggggtggagggattgggggttgcctgaaattgtccttattttattcaggctggggtggggtggagtcccaggcacagggaccttgttttgagaagtggctgtgcctgggactccgcccaaggattggggggatgctgtgcccagggtgcctctgagacctgggggcaggctgtgcttggagtccccctaggccttggcgtggtgggaacgctgtacccagtgaccccatcctcgagaccgtacctaggcagttgttgtgctgagacccccttaggcagggagaggtagggattgtgtctggaatcgcgtcctggaggccttggtttgatacgggggctgtgtccccgaccccatctccatccccatctagttctaggagttgtacctagaatctctgtacccctgtccttggttttgtggggggtctgtgtccaggatccctatttccagggccttggcaagagatggcccaggggtctgtgcccaagaccccggtctcctgggctttggcttgttgggcctgttcctggacccccacccgggaccaccctctccagccttggcaccctctctccatccgggcgccgcggccgcctcccaccctccgccacatcagcagcggcgccgcccccgacccgagcccccctctcccgcccttctcacgctggccgccgcgctgcgggacatccagggcccgggcgcccccgcctcccgcggccctggctgggcctggctccccgactgctgctgctgcggtggtggcggcggcagctcggtctgacgccggccagggcccggggccgggggatggtgcgggatgcacgcgcgcgagcctcctcggctcccgggaggattccgttccgggggcgggggagcgtccctcggcctcggctccccgccccgaccccgcccattggcccgccgcctgccgtatatgcagaaaggtcccgccccgccccgccccttggcctgaagaccccgcccacacgcagacaccatcccgccttccccggcgcggccaccgccccgccacgcccattggccagtcccgagctgagcatgcctatgaacatcgccgagtcctttcccccggtccgtcctggcctgggctccctttccctccgtgacacctgacctcagatcccctccagctccgcgtccgaaagagttgcttctagaggcgccttgccgccccacacccccaaatcttcccgctaaccccatggttccccagcccggcgggggcgggcaggagcggtgacgaggcactttttgcaaggaaggggagggggtgtgaacagaccaaggcgtcctgatgcgcgatcggttcggctttgggaacgggggcgccggggtgggaccagggcgcggttctggccgctacggcgcccccgccgccccctacgccaatcctgtgggtttggcaaagcagctggcagggacattagagcccattagtaaaggcgaggttgccaggagtgaggggagggagcccgcagccaagaggcactgtgtgtgtgggaggcctcagctgccacagcccttagagcaggtggtcagcacgtgggggggggtggggaaggcgagaaggaggttcccggcaacagatggcacaggcagggctgaggctttcagacaagggggtgcaggggggctggccatctgcacctggaggccgctggcgagctcctccccctctccccccaaccctagcgcagagaaaagagctgggggaaggggagggctgcttttattccgattgaagattcagctcccccccaccccgcacccctacctctccaacacactgagaggctggaacccgggagaaggcagctgttggaggagcgagggaggcagaggtgaggactgcctccaggaccatctcgccttccacgggaggcttgaggcagaggtgagggctccccctgatgagtctgatctgcataacgacatgcagcggcccaaggctccctcaaatgttggcaaagataagttaaccgcttccctggcttagttttcggatacccactttcgagtggggaggtgcaggatctagggcacgaagttgggagttccccagccccagggatcctgagctcctgggccaaggaggagagccaggcaagactgggaagcccaagggggctcctctgacccagggcagacggggaagggataagaggcactacagcagggtacggcctgctctggggactgaatcccccatggaggctgtcatgagggatccacccaggagtcccctttggtggggaggctgccggcagtggctgcgtctggctggcgactggcccagtagcggtggtaggtgtcctggaagaggtccctgcaggcgatgtgggctcggaggtgggcacaggccaggaaagcccctgccagcttgcggtgcagggcataggtctcctcgggtgggggacacagccggtgccgcagcagcaccgggatgaggtcctgtatgcggcgggccgtttcccccgacccaaagtcataagggccctgggtggcgaaaggctcccccaggatcatcactgcctccacgtgggcgtcggagaatgcctgggagtgggggtggggggagagcaaaggcagccagtgtggacatagagccctctgcataacccagaaacaacgtgtagcctccactccctccagtctccaccatcaacacaagccccgactcccccaagagtgagcagcttccactccttccagagcctggactagacaagcagctgcctattccccgagtaagcaccccttacttccctgcagagcctccaacagacaagtagccctctactctctctacaacagagaagcggccttcgcccctcctgaacagatccacggtgcccatgttcccagggttcctgagaagtcaggcagccacctccccccactcctccccaaagcccccagcatggataagcatccctcctagagtcacccactccccaggtatagacacacagcctccattctccctagtggagacaagcccctcctagagtcccccagtccccgggtatcgacatgccccatcacctactcgagttcctcagtggagataagcagccccccactgcaccccaccaacagacaccagcccctttctcccccagtgtctccccaccttggtttcaaagcctgtgaggaatttgaggtccctggacttctgcaggacacagtctctgtctccatcagctgcagccttcaccacctggggagacgggtgggagttagagggacaaaggccggggctcaagggggctctggagaagaggagctggaagcctgggcctcccatgtacccacctccattctcatctgcctgggccctccctcacctggaagcttcctgctcccaactttgcctgtctgtgactcccttaaagactcttccagagcctgggagtggaggtggttagggatcctgcccacctagagggcaatgtggggcctgcccgggaactgccacagtgaaacagtgcaagaaacaagtgtcagggctgctggtgagtccaaacactcaactggacgggtatgagcgtgacccagaactgcatccaaagttgccaggggccatctctctgtctcccacactggactttgagccccgtgagagcaaggatcccagttgggtttagtcgcacggggcacagggtctggtgctgaggaggccctgggtgaaccttgctttagcaaatgagcgtgtggagcagagcagctctccagccatgagctcacacacacagggcaggagttgtgggcatggagagatgcccagctggggccagctggctagggttccgtcccagctctgccacctgccggcctgttgggcctccactttctcatctgtgaagtggggatgccaaaagtgccttcctcatggggctgttgggaggataaagaaggtgatgcctgtggcctgcctggcgctgtgtctcatgcaggaagcaccgtaaatactataatctaccattattaagaggtgggcacgggggtccctatttcacagaaggggaagcagacccggagtagggagtggaaccgggtcacaccactcactactgggttgcccttttttgtgaggagggggattcgggattaattccattccctctctgctccccctgcccgagcatgtctggccatctgtcaggcctgtggtcctcagaagccagggcttttataaagtggcaaaggctgcaggcctgggtgggaggggagggtgtcagtggggagaagaagggtctcagctttgtgcctcagtggccggcagagagggccccaaggggcctgtgtgtaaggggttatcacctcctcttcctgttcctgtctcagaggtggccccaccagtccccagaccagacccctagacacctctgtccccaacttctagcccgtctgctcccatggactgccagctgggcatctcccagccacccctctgcccctctccacagctgccctgagctcccacccccaggcttagagaccacttcttattcagagggagttttcaaattctgactgcatcccttccctgctcaaatcttttccacggctccgcagggcacctggatacagtacgagctgtagagcgcagcctctaaaatccgcagtgatttgctgcagcctcgtcactgtgctgccccccgacctgccctcccactcagaatgggagcttcctttgggtgctctagggccttactactaccagtgtggtccccatacgggtagccctggcctcacatgggtgcgtgtcagaacatagcatcttacacccacctccagaccagaatctgcacttgcacaggatcaccaggcttcacatgcacatccaagtctgagaaatgctgctctaatgggactgtcccttatcactgcctcgtcttggcacatgttgtctatctgaaataccctccgagccttttcccagttggcccccctcatccctcaggtctcaatgctgacactccctcctccgggaagccctccttggctccccaggctggctcaggctcctcctctgggctcacagtgccctgcgcttcccccatcccagccctgtccatgctaggtcctcactgtcgcctcactgactatgagttctgtgaggaggggcctaggctgggcccaggtcactgctgtgtctccagctttgcctagaatagagctgggcacagaggaggggtcagaaaacatttagattggctgggcaggagggctcatgcctgtaatcccagcactttgggaggccaaggcaggaggatcacctgaggtcagcagttcgagaccagcctgggcaacatggtgaaaccccatctctactaaaaatacaaaaattagccgggcgtggtggcacatgcctgtaatcccagctactcgagaagctgaggcaggagaatcgcttgaacccaggaggtggaggttgtggtgagccaagatcgagccactgcactccagcctgggcgacagagcaagactctgtctcaattaaaaaaaaaaaaaagaaaagaaaaaaaaggaaaagaaaacgtttagattgatggctacatgattagaggacccagggcaaatgtccaatctcaacaacgaatgaaatggtattctctgcagcctctaagacaaactgaccccagtgggtgggagagacgagccaagtacgtgaggaaacacctcctgtagacagagttgcccccagggacacacacctgggctggacaccagggccctggacagcatggggtctggagaggtgacaagatggtcactgtgggcctttctcttaggagggagctgggcagtggttggaagcttgggctctggacctggaccacctgaatttgaatcccaagtctgctgtgatcttgggcacgtgacttaacccctccaggacccagttacttcatctggcctaaaacgggcctaaaaacggtccttttcgcattgtgttgctgtgtggtttatatcggttcctatacgtaagcactaaagatggagcctgacatattaagtgcttggtgtgtgctagttgctacgagtattactattatttattatttcttaattccagaaactgcatttcgccttcttactcctctgcctcagtatatggcttgagcctcagcctttcagaggccctggggtctgggggagactcacctcgatgtaatggtctgtgaactctgtcccaaactcccggcttgcaccaaagtccagcagggtcacctggaagcaaggaatggtgaaaggaatgctgggatcccattcacaccctcactgtctattggggcagccaggatctgtctccctccccatgaccctgcctgctcctgccagagtccctgcctggctgcctcactgggctcctggcctcatctcccgtttccaaccgaccccctagctgaaggcttttttttcttttagttctaattgtttatgcaataacaaattttagacccagaaaaaaaatccagagaataataaaagatatagaaaagtaaaatgaatactcacaaatcctgccacccagcctaaaatataaaatactccccatccggccacacgtggtggctcacacctctaaccctagcactttgggaggccaaggtgggtggatcatgaggtcaggagtttgagaccagcctggccatcatggtgaaatcccgtctctactaaaaatacaaaaattagccaggtgcggtggtgcgtgcctgtaatcccagctacttgggaggctgaggcaggagaatggcttgaacctgggaggtggaggttgcagtgagccgagattgtgctattgtactccagcctgggcaacagagtgagactccgtctcaaaaaaaaaaaaaaatactccccatccacgtggagcctcctgtgtatcccgccctgatcacacctcccccaggtccccagggtcacctctttcctacaatcattattaaattatttcctgaaattctcatttatgcatttctatattttctatgtatgtgtacagctgtaaacaatctagagtaatggtgtgcatattttcaaacttcacagaagtggtatttactgtcgttctcctgcaacttgtgctttttgcccagcatggttttgcgatttatccctgttgccatgtgtcgctccagctcagtcactcatttcacactgctgtgtaaggacttcgttgcgtgaatctatcacagtgcatttatctggctgaggaatactgtggttgtttctgattttttttccttctttttaaatatgtttattagttataaactctgttctgacatttttttttttttttgagacagggtcttgatctgttgcccaggctggagtgcagtggcacgaccatggcttactacagcctcaaactcccacgctcaagtgatcctcccgcctcagcctcctgggtagctgggaccacaggtgcaccccaccacacctggctaagtttgaaacattttttgtagagatagggtttcactacgttgcccagactggtctcgaactactgggctccagtgatcctcccacctcagcctcccaaagtgcagagattacattagtgagtcatctcacctggcctgtttctaatttttgtgctcaatgaacacctgtaagaatgtttctagggcagtagagtttgaactgaccacaacccacagtaagaaattgtttctactggtggctgggcgtgatggctcacacctgtaatcccagcattttgggaggctgaggggggcggatcacctgaggtcaggagttcaagatcagactggccaacatggtgaaaccccacctatactaaaaatacaaaattagctgggtgtggtggcgcacgcctgtagtcccagctagttgggaggctgaggcaggagaatcacttgaacccaggaggtggaggttgcagtgagtcgagattgtgccactgcactccagcctccattctcaacaagagcaaaactctatctctaaacaaacaaataaataaaattatatatatatatatatatatatatatatagagagagagagagagagagagagagtttctactgggcgttcatgcaaatgcacacaaaaacgtcaaacaaaagtgtcccaaggccaggcgcaatggctcatggctgtaatcccagcacttcgggaggccaaggcaggcggatcacctgaggtcaggagttcgagaccagcctggccaacatggtgaaaccccatctctactaaaaatacaaaaattagctgggcgtggtggcaggcacctgtaatcccagctacttgggaggctgaggcaggagaattgcttgaacctgggaggcggagggtgcagtgagccgagatcacaccattgcactccagcctgggtgacaagagcgagacttcatctcggggaaaaaaaagaaaagtgtcccaaaataatatggatccctcccatctgtgacatactgacatcatctattccataaaaaaaaaaaaagtgctggtggatcatgaggtcaggagttcaagactagcctggccaaaatggtgaaacctcatctctactaaagatacaaaaaattagccaggtgtggtggcgggcacctgtaatcccagctacttgggaggctgaggtgggagaatttctcgaaccccagaggcagaggcttcagtgagctgagatcgtgccattgcactccagcctgggcaacaagagcaaaactctgtctcaaaaaaaaaaaaaagtcctgttggaaaccaataaattgatgtcaggactcctatcacttggagttgggtaaacatatccctggggtatgaacctaggaggggacacagggtgtatgcacattgtggagaaagaagaggcaagggactagggctggagactccgtggggccacaggatgctcagcaaagggttcagacttgattctgagggggctgtgaagctgtaggagggatatcttgaccagatttgtgctttagaaagacccctctggggacaaaatggggatagaccactttggaaaacagttggcaacccctgataaaggtaatgatgtatccaccaacactcaagtctgcaggtccaaaccttcactacaggtctttgtacaccccctgccctctgctgggaacactctgctctctggatggttgtctccttttcccctgtcccatctcagccttttttttttttttaaatagagcccaggctggttttaaattcctggcctcaagggatcctcctgcctcagcatcccaaagtgctggaattacaggcatgagccaccatgctcagcctctggtctcagctttttttttttttctttggtgagacagagtctcgccctgtcacccaggttggagtgcagtggcatgatcttggttcgctgcagcctcgacctcctgggctcaagccatcctcccacctcagcctctcagtggcctcagctttaatggcacttgctttaagaagcctcccttaatccctgctcaccccacagtgagtcaggcactttccctgggatcccataacttcctgtgcctcccccaactccagcccccacccctctgcctgtgcctcccccatcccggtcctgacccatctggcctgtgctcctcattgtggttggtacgaaccactctaggtcatcgctgtgtggtgccaggtccccccactggactgggcactctgagaaggcaagggtcagggatgtctttttattgctgtcaagaggcaagggcaggtgatggtgtgttctgtatggatgacgagtgtggtagtgatggctaactgccttccaaaagctgtacttcccctctgtgctgtcacattgccaccaggaaccactgcctagccagggactccattttccagcatgccttgcacctaggcaggctatgtcactagctctcactgatggaatggcaacggaagtgctatgtccattgccccaggatgagcttagtgtatttagcctgggcattactttttccacttctggccaaagcagttaggcagggggctaccctcaacctctcttaccctttccttgggaagcagagcgttgcaaggccccagggatggcaaaaccacaaaagggaaggagctgggtccctgaatcccacttggaaaagggccacccctgcctattgtgggggtaatcaactgctattttgttgagctaccgaaatatcaaggaatatttgttacaacagcaaatgtacccagacacacatcactaggaaccaacctggtggctggaggcatcatacaggaagttggcccagttggggtcagtctgcatgaatcggaactcaaacagctcccgcagacacagcgtcaggagctggaagcaaatctggggtggggagaattaacaggcatctcagtgtgatctcccttgtggtgccactgctggcctggagagagaccatgagcctggcccacccgccctggggccatgcccttcccactgtgccaccagacagcatacctggttccgcaggtcctggcttaggccctggcactggtccagggggacccctccagccagctccatgcccagcacccgtgtcgtgcacagctccttaaccacggctgggacccggaagaaggggtcatttgccagcagctgcctggggcagaaggaaagggaggaaggggacttcgtgcttcaggcttgtgacccagcttgagacctcctccttgtgctctcagaagtcctccatgaacagtctgcgccatgccctccctcctgcccatctcttgctgctgtctgccctgggtgatgaccaacacctggctggactgagatttaacaagtatctccaaggtgcctactctgcacctgcctctcaactgggtgctgctggaaacccagtcaccacttccctacccgaaacccttctatgacttctggttgccccagaaggatgagttcaggtgtatttcagcctttgcattactttttcattaatttattaattcattcatcccaaaagtagtcactggtatcaaaatctgtgaagtctatagtgatacccatgggtcagtccttgcaatcactactctgaacacaggtaaatagcgggaaagaatcttctgtgtccatccttgtgctaaatgatgctggggacagagcagtgaatgaaccagtccctggacctggcccccaaccccgagaccacactctcacaaacagacggattatagattgaggtaagtgtgttggctgggtgcagtggcttacacctgtaatcccagcagtttgagacaccgaggtgggagaatcgcttgagcccaggagttcaagaccagcctgggcaacatggtgaaacctcgtctttatgaaaaactacaaaaattagctgggcgtggtggcctgcgcctatgttcccagctactcaggaggctgaggtgggaaaatcacttgagcctgggaggtcgaggctggagtgagctgtgatctcaccactgtattccagcctggaaaacagagcgagaccctgtctcaaaaaaataaaagaagtatgtctatgtaagatttgggaggcagagaatatgagcaaggtctctggttgaggatccgtgggatggctggaggagagtgagggagaacaggagggtggtgtggggttttatcctaagggcacccgggaatcctgtgggggacgggggggtctctggcccatcaccccacttcacactctcttccttgagctcctcctttggggtttgtatttttgtccttgttgataaaaatctctgatgtttgaactgctcctcatgaaccggagccatgtggggcatttaatcggcacactcccctttcatcctcactccacagtgaggggatgctctctggaggccactgtacagattgtatggatgcaggccacgtaacctgttaagggctgacccaggatttcatcccgcatctgagtctagggtgtgtgcctctaaccactgccttctactgagctttcactctctgtctacagagcttggcacgttttaggctgtcaataaatgtgtgagccacactgtggaggaccccactgaggtgccattaattgctacacatcaggatgcttccaagatataaccacattgttccacgtagccatagttcatgcattttcactgctacgtaatattccacagatgaatataccgttgcttatttgtccaccctgctggataaacttgatggatatgggttgtttccagtttggggctgttgcagacaagcgttctagaacagtctgatgatggatactggcaaaagggtccctagagtgttcagcagggagggcaatcgttggcttgcagagttcttgaatataagggcttatgtgatgatgccaacctgttctcaaaatgcttctaccaccttctcccacaacctgcagtgcagaagggatgctgtggagcccactctctctacctcccagtgctgtgggctccttgctctccgtcagtccagcagaggtaagagtgtgtcattgtgtaattaattaagtgcctgtgtcggaccacagtggatatgcggcccatctgacacaggagaagactgccgcttgggaagtgacctgcccaagctcacagaggacaaagggggtaagcgaagtgatggatgagtggaaggatggatgaacaatgattgaaagaaagagagagtttgccctaccccacagctccagctgccagaagctgagggggcagctacttcccacccagcctgggagggagggaaggagggaagctcagggcactcagctcacctgaaattctgggcacaagccgcctcacgacggtagtcacactcccaagccagctcctgctgcaaggcctgcaggctctgctcggcaaacaggcctgtgggggaggtgtgtcagccagggaagggccccgagcgcccactggtggatgccttctcctgccaaccctctctctcctgtctcccgcgctgtccctcacagctcctactctaggcctgtgacccacatctgtccctctcctgtctcccacgcagctcctgctcctgcctctgacctgcatctgtccctctcctgtctcccccgctgccccttgcagctcctgctccaggcctctgacctgcatcgtatcatctgtctacacatttccctcgtccttcatagcaccacagggttccccggggtcttccgaagccttttctgggctctgtctcttgcacatgcctgcaccccagtccctggcagctctttcagagtcacgcctgcctctattctgtctccttttcatactgactctcacgttgctcactgcatctgaatctcacttctgggcctggctttccctctccctctccgtctcttacacaaacacaacccaccctcctttctctaggcgcctcctcacgtgccatccccaggactgtccttttctgctctgccgcacctacaatcccgctccctgcatgcacaccctctgagagtctgctgctgtatcttggccctgggctcccgtctctctaaggctctgttaaaatccataaggcttttcccacacctgctcatgctccctgggctctccccgccttggtgtcctttctgtctctgacactcccgctcacaacgccagcacaccctgcccgtgctctcctctgggctccccctcctgctttctctctctgggcatagcccctttgggaggtcagcagaggagtgggtgggcgcctcacccgcgggcagggccgcgctcatcttgagtaccgccagcaggttctggacatcgctctgaatgctctgggctatgccggggtactgtaaagggagaagggagggagagaaggtgggagtcacttctctgggctagcagggtgcccgcccctaccctgcccagcctcccctctcacctggatcttcacggccacctccgtcccgtccctcagcaggccctggtgcacctgcccaattgaggcagcggcaaagggcacctcctccaaggaggccaccttggcctgccagtccctgccgagctcctcttcaagaactctctgcggggagtggtcacagccatcatcattgtggcagagttcattccccaggctgagtgctttacgtgttgataaccccagcactcaccacatgcagggccctgggctaagctcttggctgccaccccctttgcagatgaggaaactgaggctcagagagagctcccttgtgcaagtgactagccaggcactggcagactgtgaggctcagcctagcctgtgtcccctgaacctggactccctgggctgttgtggggattgctattatttatagttaagactcataacaatcctttttttttttttttttttgagacagggtcttgttctgtagcccaggctggagtgtagtggcactctcacggctcactgcagcatcaacctcccgagctcaagccatcctcctgcctcctgaatagctgggactacagatatgtgccactgtgcccagctaattattactgttattatgtttagtagagacaaggtctcactatgttgcccagggtggtctggaagtcctgagctcaaatgatcctcccaccgcagcctcccaaagtgctgggattacaggcatgagccattacacgtggccaaccatcctttattatgctcttatatgttattattaactcacagttactgtgatcaagaagagctaaaatttacaatgggcttcctgtgggccaggtcctattcagagtggcccagagagaggcagtacctgcctggggccgcatggcgaataagcagaacagggatgggagagcaggtgggtggcggaatcctggattccatgccttacccagttattagaacagctcatgtcctgggcacttacttggtgccaggcgccgtgccaacctattacagacacgatctcctttaattaaaaaaacagtaataatcacagctaacacctgcatgttgctcacagtgaatcaggggccgttctcagtgctcagtgtaaactgatttatgtgaccctatgatgtgggtgtggctgtcactatcgccatttcccagggaagggaactgaagcacagagaggtcaggctgctgttccctgttttaatcaccacagcaatgctaggaggtgtgtactctggtgattcccattttacagatggggaaagtgaggctcagaggcagggagtggggcagtgaagccaggaaggtcaggcaggtcagaggagatggagcctgcctccctcaccgccctcccccactgggcactcaccagcatctgccagcggggcatgaagtcggcgctctggcggacccgctcaaagatgtgctgcagctgagggctgatgaagctgttgtcttgggagacagtggaaccaggggggaagtaagcgaagaggtgaggagggaccccgtgtgagtatctgaagttggggcctgttggtgggtagggctggggtagaagggaggtcaggggtcaggagtcgagggtcatgctgtaccctggatgctgagcatctggccaaccttgagggcggcccctcgaactgtacataaggtctgcacaatccgctcggcattggcctccgacaggaaggggctggagtccagcccagaaccaccctctggggagagaacaaccattagaattataaccacaaatatcatcactgcggccaggcccggcggcccacgcctgtaatcccagcactttgggagacccaggcgggatgaacacaggagtctgagaccagtctgggcaacagtgacatcctttctctattaaaaaaaatatatatcatctgcacaccaacaggaatggctaaaacgaaatacggaggccaggcttgttggctcgcgcctataatcccaacactgggaggtcaatgcaggaggatggcttgagtcaaggagttccagaccagcctggataacaaagcaagaccctgtctctaattagctgggtgtatggtggcatgtgcctgtagtcccagctactcaggaggctgaggcaggaggattgcttgagccctggaggttgaggctgcaatgaactgtgatcgcaccattgcactccagcctgggcaaccaagcaataccctgtctcgggaaaaaaaaaaaaaaaagaaaagaaagaaagaaaaataaacataagttaaaacaaattgcaggagagtcaaagagtaactactacagtattgaatagatgagctatcactacacacaacagcccaggtgggtctcaaaaatgtaatgctgagtgaaagcagccgggtgcatgaaatcatcacccagttacactgatataaagagcaaaacaaggccaaacaaatccagggtccaggagccaagacagaggtcacccttggtgaggggagtgaccaggtggggacatgagaagggcaacgattctcgaaatgtgggccagggacccctgagggtccctgagaccattcagaggggtctgagagatcaaactatttttatcgtaacattaagatgttattttcccctttctgctctcatgcgtctaagaacattcactggagttctccagaggctccaggacatgtgaggacaccatcagactgacagctgatggaatgtgtacgtgtgtactcttgtgttttaaaaatatctctgtatttttgttgtgtttttgagacagtgtctcactctatcacccaggctggagtgcagcggcacaatcatggctcactgcaacctcctgggcccaagtgatcctcctgccttaacctcctgagtagctgggactacaggtatgcaccaccatgcttggctaatatttttactttctgtaaaaatggggcctcgctatgtcactcagactggtctcaaattcctgacctcaagggatcctcccgccccagcttcccaaagtgttgggattacaggcgtaagccaccgcacctggcctaaaaatttctcagttttaatttctaatatggtagacattgataactataatccacataaataagctctttggaggctcattctaacagttttattgagaaataattcacatactgttataattcaccatttaagttatataattcaatgattattagtatattcacagagttgtgcaagcatcaccagaatcaattttaggacagttacaccacgcaaaaaagaaacctggctgggagtgctggctcatgcctgtaatcccagcactttgggacgtcggggcgggatcacttgagttcatgagtttgagaccagcctgggcaatatggtaaaaccctgtttctacaaaaaatacaaaaattagctgggcatggtggtgcatgcctatagtcccagctactcaggaggctgaggcaggaagatcacttggacccaggaggtagaggttacagtgagccgtgatcccgccaccgcactccagcctgggtgacagagtgagaccttgtctcaaaaaaagaaaaaaaaaaaagaaaccctatacccattagcagtcactcttcatttcccccaatctccccaggccttgacaaccactaatctactttatgtccctacagattttcctattttgtacatttcatattaatggaatcattcaatatgtggtttttcagtgtgtggttgcttttacttagtgttttttttttttgaaacagtgtctcgctctgtctccaaggctggagtacaatggcatgatcttggttcactgcaacctccgcctccccggttcaagcaattctcctgccttaccccccacccaagtagctggggttacaggcacccaccaccacatccagctaattttttgtatttttagtagaatcaggatttcgccatattggacaggctggtcttgaactcctcacctcaggtgatccacctgcctcggcctgccaaagtgctgggattacaggcgtgagccaccgcaaccggcctcacttagtgttttcaagattcatctacattgcagcatgtgtcagcccttcattcctttttatggctggataatattccattgtatgcctatcacattttattcatccattcatcagttttaaaggtgtgcagggatcctgagaccaagaagtttgagagcagctattctagggtttcttactctgggtacggacaaatgtactttgtgaaaacgcaccaagccatacacttacaggtatgtgtacctgggtttatatgcaaattacatttcagctttggcaaaacatttatttttctttttttaatatgaacactttatgaatttatgtgtcatctttgcacagaggccgtgctaattttctctgtctcattccaatttttatttatatgtgatgctgaagcaagcacagcacaacaaagcaattcttaagcctttattaattttgaaggccagttgtggtggctcacagctgtaatcccagcactttaggaggccagggtaagaggatctcttgagcccagaagttcaaagctgcagtgagccatgactcaccactgcactctagcctgggtgacagcaagactctatctcttaaaataaaatttaaaataaaataaaatgttattgagctcattattgagctgttccaggcagaatcctaagtgtctttgtggattctctggctgaatgcccacaatcacacctggaagtaagaattatcaatcctttaattttcaaggtgagaaagcaagagactcaaagaggtgcagcacctatccctgggtcacatagcatggaagtggcagagtggggtgtagactcaggctggtcatacccaaaccctaatcctccacctaccctcaactttttattttgaaaaaaatatccaggctgggtgtggtggctcatgcctgtaatcccagcactttgggaggctgagcagggaggatcacttgaggctaggagttccagaccggcctgggcaacatggcaaaaccttctctctacaaaaaatacaaaaaattagccaggcgtggtggcacgtgtctataatcccagctatgcaggaggctgaggtgggaggatcacctgagcctggggaagtcaaggctgcagtgagccatgatcgtaccattgcattccagcctgggtgacacagcaagaccctgtctccaaaaaaaaaaagacagaaaaaaatccaaacagaaaagttgcatgcataatatcgtgaacacctgcacacccgcacaccctccacctcgattcaacatggtaccattctgcttcgtctgctttatctgtgcgtgtacccacacacttactattattattttttgctgacccacttgcatgtagttgcacttaagctttgctaagaataaggatattcccctacacaatcacagtaccataatcacatgtaagaaaattaacaccaattccttaacatctgccatgcagtccatattcagattttccatttgtctccaaaaagtctttcatggctgttttttccaaactgatatgcaatcatggttcagatgctccatttgtcaaataatgtctctttcatctgtttttaatctggaatatccacccccacttgtttcaagacattgacttgttgagggaacctccacctaccctcaactttttattttattttttataacggcaaatgctacacatctaattccatctctgatgtacacagaccctcgctggcacttctattttcagctttctgctcctgctccaagttaggaactcccaatggcttaaatgttttctcagataatctaatatgtggctgggcacagtggctcatgctataatcccagcactttgggaggccaaggcgggtggatcatgaggtcaggagttgaagaccagcctggccaacatggtgaaaccgtctctactaaaaatacaaaaattaaccaagcgtggtggcatgtgcctataatcccagctacttgggaggctgaggcaggagaattgcttaaacctgggaggtggaggttgcagtgagccaagactgcgccattgtactccagcctgagcgacagagtgagactccatctcaaattaaaaaaaaaaaatctaatatgcttctcttaatcatgaccctgatagtggtttaggcctgttcaaagcacttcacaatgactctaagaggtgggtaaattatcaccacctccatcttccgcatgaggaaactggagctcagaggggtgaagtcacttgccccaggtcacacagcaaagccaggatctgaacccaggcagtgtggctcactcacctgactgcagacgacctcctggcatggacttcttagccatctcggccagtactcctagccccaagcccacagccagtcctggagtgcaagagaagaacatgagtgcccgtttgcctggggtgcccccagcctaacccactctcctttctcagtttttctccaagaatgcttgtctcccaactctttttattttttcttttgtttgagatggagtctcgctctgttgcccaggctggagtgtggtggcacaatcttggttcactgcaacctccacctcccgggttcaagcgattctcctgcctcagcctcccgagtagctgggattacaggcacgcgcccaccacgcctggctaaattttttttgtatttttagtagagacggggtttcaccgtgttggccaggctggtctcgaactcctgacctcaggtgatcctcccgcctcggcctcccaaagtgctgggattataggcatgagacaccgcactcagtcttgtctcccaattctttgtatctctgtttccaaatcagtctctgactctgttcctgcatggggctccctttaaggtgcagcttcctctttctttaaccctttctccatgtctctgtctccctcccagcagttctcagccctggctgcacattccagttaccagaggagctccggtaaatataatgcccagactccactccccaaattctgattaaattggcctgagacatgggaatttgtgttttgttaaaaagcacctcagataattctaatgtgcgatcaaggttaagaaggcccctcggccgggcacagtggctcatgcctatgatcccagcactttgggaggccgaggtgggcagatcatctgaagtcaggaggtcgagaccagcctggccaacgtggagaaaccctgtctctactaaaaatacaaaatcagccgggcgtggtggtgcatgcctgtaatcccagctactcaagaggctgaggcaggagaatcgcttgaacctgggagacagaggttgcggtgagccgagatcacaccattgcactccagcctgggaaacaagagagaaactccgtctcaaaaaaaaaaaaaaaaagaaggccccgaaacaattgtcctaggtccctctgtcttctggtgactcttctttctctgtccacacctcctcttctttatgcttatctctttttctttttagagacagggtctcactctgtcgcccaggctggagtgcaatggcaccatcataactcactgcagcctcaaattcctgagctcaagtgatcctcttccctcagcctcctgagtagctgagaccacacgtgcataccaccacgctcacctaattttttattgagacagggtctcactatgttgcccaggctggtctggaactccagaactcacgtgatcctcctgcctcggcctcccaaagtgctgggattacaggtgtgggctaccaggcttgacctctccctttctaagccagttatttctgcatctcttgccttctccccatttgtcctatctatctagatctctttctctcttttcctccctttgatgttatctctccatctctgatttcctctgctacctctcctcttgtccctaaagacgtctcgggtctctctccttcttttgttgtcaccatctctgtcaattaccatatctggcattttctgtgtcctttctacatgtcaggggctgttcccagtgccttctgtgcacttactaatttttgtccttacatgaggtctccaccttcataaaatgtattttacagaaaacttccattttacagaaaaggaaattgaggttcagagaagtgaagtaatttgcccagagtcacgtcacaaagcgaggacacagcagagtcatcccttaatccctgggcagcctggtgccaaagctctaaccagtgcctttgactgcctctgcagactgtgaatctatctatgtatatatatatagattttttttttttgagacagagtttcactcttgctgcccaggctggagtgcaatggtgcgatcttggttcactgcaatctctacctcctgggtacaagcaagtgaatctatatttttaaaacttgaaccaggcggggcatggtagctcacgcctataatcccagcactttgggaggctgaggcaggtggatcacgaggtgaggagttcgagatcagcttgaccaacatggtgaaaccccatctctactaaaaatacagaaattagcggtcaggcacagtggctcacgtctgtaatcctggcactttaggaggccaaggcaggcggatcatgaggtcaggagatcgagaccatcctggccaacatggtgaaaccctgtctccctaagaaaaaaaaaaaaaaaaacaacaaaaaatagttggacgtggtggcgtgcatctgtaacccccgctactcaggaggctgaggcaggagaattgcttgaacctgggaggtggaggttgcagtgagctgagatcatgccactgcactccagtctgggtgacagagcaagactccatctcaaaaacaaaaacaaaaacaaaacttgaaccatgatcagcaataagaagacatttacgttataaccagtgcagaccaaggtatatgtttcacgaaacaagactttcccttgctctacaggtgcatgcatattttctgtcctattcttctttttaaatgctggttgcaacccactaaattatttcatgtgacttgcacgacatccggctgtgtaacccaaagtcaagtgacctcccctttgttagcctcaatgtcctcatgtacggaatagaacactcattgattcagtgcagcatgtgtgtatatgggacactgcacattacaggttctcagtaaatgttattatggccaggagcagtggctcatgcctagaaccccagcacttcgggaggccgaggcaggaggatcgcttgagaccaacttgagcaacatagggagaccctatctctacaaaaaaatattttttaaattacccaggccaggcacagtggcttcccgggcaccgtggctcacatctgtaaatcccaacactttgggaggccgaagtgggtggatcacttgaggtcaggagttcaagaccagcctggccaacatggtgaaattctgtctctactaaaagtacaaaaattagccaggcggccaggtgtggtggctcacgcctgtaatcccagcacttgggaaggctgaggcaggcggatcacaaagcgaggacatagcagagtcatcccttgaaccctgggcagcctggtgccaaagctctaccactgcctgacaaacatggtgaaaccccgtctctactaaaaatacaaaaattagccgggtgtggtggatgcatgcctgtaatcccagctacttgggagtgtgaggcaggagaatcggcttgaacccgggaggtggaggttgcagtgagccaagatggcgccactgcactccagcctgggtgacagagggatactccgtctcaaaaaaaaaaaaaaaaaaatagccaggcatagtggcaggcacctgtaatcccagctactcaggaggctgtggcaggagaattgcttgaatgtaggaggcagaggttgcaatgagccaagacggtgccactgcactccagcctgggcaacagagcgagactctgtctcaaaggaaaaaaaaaaaaaaattacccgggcggatggtgcacaactgtggtcccagctactcaggaggctgaggcgagagaattgcttgagcccagaagtttgaggctgcagtgatcgcgccactgcactccagcctgggtgacaaagtgagactctgtctcaaaaaaaaaaaaaaaaattatcatttatgttcctcttgatttctcttggccttgcaggcccttgcctttgtctctctttttttgtctctctctctttcctgtctctgattcatcctctcccttgcttcaatctgtaaatgttgccctttctaattgaggtcacaccaagatcccccaaagtcacacctacccccaaagttggccaagcggctgatgcgggaggcaggcaccttgcgttctcgagagcggtcactcagctgggaaatggggacaaggtctgagggtgggaaagtgggcatcgtggccagagagtgcagccactctgccaccacacccttccccaagctcagggggccagcagtattcgtggggtgttgctgggtgggtgggggtaatgatacctggggccggggtgtcttcctgggacgggcctcccgtgccctgcgaatgtcctcctcacccaggcctctcccaggcccatcctggtaaaacttttgggcccaagaacctccacatggtccctgcaagagatatactttgataaggaggggaggacatgggatcacctggcccttctggacccctcctgtccttttaccctctgaagtctccctcagcctcttccccttggggacctgctccctagcctcttacccagcggtggggcccaggccccagggccccacaaggccaaccaacagtctggcccagctgtccaccggtcccccgaagtaggccccccaccttcagccacattgcctggaggagaagaggagggattattcaggtgggagttgcctggcttcttggccaggcccccatgttcctctgtgtccaccctctctcattcccacccactaaatacttcctccactattaatagattcccacagtttctcctggttctcccctggttgctaggaacccttagctcttcctgcaggcctcccaaaacccactttcccccctctcccaaccctcgccgttgctagggtccgcccccgttactagacacccacagttcctcaggggctacctctccacttctctgaaacccccctcgttgctatgcaccgccttcccctctgttggccctgtaggcacccgcaattcctccggtgtccccccgcccgatccccaccccgttactgagcacctccccccgttgctaagcacccactgctctcagcctccgagtccgcaacctgctggggccctcctgtgcttccgggagcctctgtatgcccgcccccttcggccagccaaccaatggcgcggcagcaactcgctgactggcacggagtttctccatctgtgcgcgggggaaggggccagagagaggccctagcgatggagcctggaattaaggtgggcatcgggggcccatctggggggattgctgaggcatcgcgggagcgcaagcgtgccctgtctgcccttccactcacctcaaagtgccttgtacgcgacagacccttctgttccctacactttcttgcaaagtctcccttacaaacctgacgcctctcttctgcacgaatatcttgccaaccccccttcttatttttacccctggcaggctcaacacaattcctttgaatacacattcttcccagcaaacatttcccttgcacatggagcccctccactttgcacaaacacccacattctggcacccaacctccttccttgtgcatataaatcccttgccttgcttgccaactgtttcccgctcacgccttcaactctctcgtgtacataccctcccccccacttgcacactgagtctctgttccctcacacaccctgttctctccgctccccgcccacctgcggaatggtgcgactgggagccctctgcttcctgtaggcctgacatttcccagaacacactcagccaagattcccagtgctgagtcaggaaccttggcatcccagaaaaccacctcccatcctatctttctttctctgtgtgtgtgtgtgtgtgtgtgtgtgcgcgcgcgcgttggaaagcctgctctccccacaacaggctgactcacccacttctcacagtctggaatagaggcatctggttggggcatctttcccaccactgggagagggagggatgccgatgcttcccccacagaaccccgctgccccaacccctcttgtcgggaatcaggcctctttgtctctattcccgtactgtgtgacctcagaaaagccctcatccctctctggacttctccttcccaacctgtatgaggtactaggtgggctcctgccttcgatttctctcattggtctgtgaaaaggtgactcattttagagccttggacctgtgcccaatgtctcccccagttgactcaatttcaagacaaaccacctcctctcccccttcagaggtgaacggctgactcaggagctgggtggcagctcagccttgggggcaaaatatatcaaaatcacctaggacaataaataatcctactgggctacaactgacagtgccaggcccggggccacatgcttcacatacatgagatcatgtcagatagccccgtagctgcaagcaaagggtagaggccggcagatctctgagcctctgttctcacgtgtaaaatggagccctggcatccctattgttcagccttggagaatgaactgaaatcgtgtcagggtctgatacagaacaagtactctatacatgacagagatttcttacggaaaatccaatggagcgtaagtcatttgctcagggtagcggagctgggaactggcagaggaaggtctcgaacccacacccgtgggaactccaagtctttgaaagtccgtcccgcccctgcgtgaagaatgggcgcgcggctggactcgtcaccgggggttttagggaaggttgaacttgtcattcaaccgtgtagggagggtggtttagtcacaggggtggagggagggggcccactggcgcgccaccaggaccccggtgccctagatgcatacctggccgcgcttcggatgctcagaggcaaaccccctccccttgggaggcggagtcggacaaggctccgtctcgttccgttccgtcacgtccggtggggcggggcttcggggctttcccctttgaggggagtatcggttaacccttgcgcggcggggcgggctggagctccgcgggccggaacccgggagtcggggctccccagccacacccctcgcgggatttaaagggataggaggggccgggtcggccgaagcccgaaccgaaggagcgggcatgaggcgctgcccgtgccgtgggagcctgaacgaggcggaggccggggcgctgcccgcggcggcccgcatgggactggaggcgccgcgaggagggcggcggcggcagccgggacagcagcgacctgggcccggcgcaggggccccggcggggcggccggaggggggcgggccctgggcccggacagaggggtccagcctccacagcgagcctgagagggccggcctcgggcctgcgccggggacagagagtccgcaggcagaattctggacagacggacagactgagcccgcggcagctggccttggagtagagaccgagaggcccaagcaaaagacggagccagacaggtccagcctccggacgcatctagaatggagctggtcagagctggagacgacttgtctttggacggagaccgggacagatggcctttggactgatccgcacaggtccgacctccagtttcagcccgaggaggccagcccctggacacagccaggggttcatgggccctggacagagctggaaacgcatgggtcacagactcagccagagagggtcaagtcctgggctgataacctctggacccaccagaacagttccagcctccagactcacccagaaggagcctgtccctcaaaagagccaagtgctgatggctcctggaaagaattgtatactgatggctccaggacacaacaggatattgaaggtccctggacagagccatatactgatggctcccagaaaaaacaggatactgaagcagccaggaaacagcctggcactggtggtttccaaatacaacaggatactgatggctcctggacacaacctagcactgacggttcccagacagcacctgggacagactgcctcttgggagagcctgaggatggcccattagaggaaccagagcctggagaattgctgactcacctgtactctcacctgaagtgtagccccctgtgccctgtgccccgcctcatcattacccctgagacccctgagcctgaggcccagccagtgggacccccctcccgggttgaggggggcagcggcggcttctcctctgcctcttctttcgacgagtctgaggatgacgtggtggccgggggcggaggtgccagcgatcccgaggacaggtctggggtgagtgggacccatcctgcccttgagccacatcacgcaaaactccttattcctccgcctttgcttaggaagttctctacccatttactgttagttgcccaccagcaatttcatctccgggaacctcttccatccactgacctcctccctctgacagccaggttactaattcactccaggcaccccttcttaattctctcctttccccttcctgcactgtctccactcctgggggtctacaatggagggccactgaccgactttatggggcccaggaacccctgaaattgtaggactaaggagcctgccgtgcgtgttcacatacattgttgcagcgacggtctgacatctgtctaatcctctggaatctgaagaacactgggatagggagacaggcagggtgcactttctaccccacatttcttaatctggggcctgtggctgtcttaaagggtcacaaaccttcaccaccccttagcctatttgtatgtacatttttctagggagcaaagcgattcccccagcttgcatcagattcgcaaaagggctgtgtgaccccaaacgccaaaggatccttggcctagccgggagcccacctggtctcccctgtgacccctacatccccaaggagccccctgaacactcttgtttactttgtccaccgtcacccccagcttgggtgtggctctcccctggtgaatcaggaggaccggccgggcaggttcagggagggcgggacagagcagaggccggtgtgaaactggagagcctcacgtggggctgggagccgtggggctgggagccgagtccggagtccatcagcttgccagcttgcctgctgaggcctctttttgctctggggcccctggctggagtctgccctgagccccgcttcaccccacatgccttccttggggacgtgttcacacatgtggccctagctgtgagagacagacctgccttgacgtgcctgtgcctgtgtgcaggggctgaccctcctgggccccattgcttttttctctctgcctgccctctcacttccttggcatctcagaacagctgagctggaagtgggtgaataataataataataataataataataacaacaacaattagcactcactcatgtttagccctgtgctaagtgctgtgcttttattaactcactcactcctcgcagcaaccctaatgaggtagatactttttttttttttctgagacagtctcgctctgttgcccaggctggagtgcagtggtgccatctcggctcactgcagccttcacttcctgggttcaagtgattgtcctgcctcagcctcctgagtaggtgagacaccaggtgcccgccaccacacctggctcatttctgtattttgagtagagacagggtttcatcatgttggccaggctgacctcaagactcctgacctcaagtgatccacccgcctcagcctcccgaagtgctggaattaccagcatgagccactgcacccggctgaggtagatactattattatccccttttacagatgaggaaactgaggcacagagaattcaagtcacttgtccaaggatatcaccttgcaagatgcagatcaaataattctaatccttactgtacaccagacactgttttaagttttttcttcttttttttttttagtcttttttgtcaatttttttctgtcattttttatcttaaaatagcatctatcttaattaagggctttgtatgtgttaactctgagtccttatgacagcactgagattgtctccattcaacagatgggggccaggctcagtggcccaagcctgtaatcccagcactttgggaggccgaggcagggggatcacctaaggtcaggagttcaagaccagcctggccaacatgatgaaaccctgtctctactaaaatacaaaaattagccaggcgtgtgatggcgggcacctgtaatcccagctacttgggaggctgaggcaggagaatcgcttgaatgtgggaggcggaggttgcagtgagccgagattgcaccactgcactccagcctgggtgacagagcaagactcggtctcaaaaaaaaaaaaacaaaaacaacagatggggaagctgaggcatagagaggtgagagattctttgcttagggttggccacgtcaagtcagagccaggattctaactcagttctggctgagtttcaaacccatcgtttaaaccctccagtgtgtagatctgttcctaacttgtctccctcccaggcctccctatctccagtttttttctcatccttccagaatctgcctccatggcccagctttgtctgctcaggtgccctctctgagagcagtcaggggctcagtgctgcgtttggagcctccggtctccaggcgccttcccagaatcgacttccttccctcctcctgaccccctctgctgtaactaggcctgagtacacactgttccttgaacactcttctgttgtcctgcctccacgcattgctcaagccgttcccactgcccagcatacccgtgcttccttctcccttaattttgaaatcctctctgaccgtaaaggctcagcttcctttctccctttcctccttccttccttctcaccatcctgtcctttttttaaaattgtgttctctttctttttctttttttggtagggatggggtcttgctatcttgcccaggctggtcttgaactcctgggctcaagtgatcctcctgcctcagcctcccaaagtgctgggattacaggtgtgctatcctattcttctaatgagacaaaaatcactccctaagcccctaccatgtatttggtcctatgttagctttgctggggaaacagcagtgaccaagacactcatggagctcccaggcccatgaaagagacagaccaatcagccgacagtcacagttcagagtggtcaggaggatgtgtgagcccagaaggaggtcactggccagacacagggtatcagagagggcttcctggaggaaggggcatataagctgagaccattgtgaaaaaaatccgagaaagcccagataaaccattggatctaactttttttttttttttggagggcgtgcagtgcggagtttcactctgttgcctaggctgaagtgcagtggcgagatctcagttcactgcaacctcagcctcccgggttcaagtgattctcctgcctcggcctcccaagtagctgggactacaagcgcacgccaccacgcccggctaatttttttttttagtagagagtgggtttcactatgttggccaggctggttctgagctcctgacctcaggtgatccacccacctcagcctcccaaagtgctgggattacaagcatgagccactgtgcccggcccggatctaacataaaacagagagagaagatattatgtttatgattaaggggccaggtgtggtggcttatgcctataatcccagcactttgggaggctgaggtgggaggattgcctgagcccagaaatttgagaccaccctgggcaacacagtgagacctcatctctactaaaaggaaaaaagaactagctagatgtggtggtatatgcctgttttccagctattcgggaggctaaagcaggaggattgcttgagcctgggaggcagaggttgcagtgagccaagatcacacctctgcactccagcctgggcaacagagtgagatcctgtctcaaaaaaaaaaaaaattactattaaaaaaatcccaactaacattcttcagtccaagcatcaaagaatgtttctggagcgtctgtcgtgtgccaggccatgtgctggggacataatcataaccatgacaaccccagtctctgccatcatgagcttgtagtccagcaagtgtgtaggggataagccccaaggcactgggatccaaccagagctagaaccccagcgctgtgtggggtgatgttaggtaagtggcttcacctctcagaccctctgtttcctcctttgtaacaccgagacgataatctccctggggttgtgtttttagaaattaagtaggttgtggcacactgagtctttgtcattgtgtctggaatgttccaggtacttagtaaacaggaacctttattaatcatctcttccccagggccggcagctggattggggagggactagcccttcccgaaccctgactccctcttaaccttcccactgtcaaagagatgtctgtgaggtagctgggctctgagggggcgggagagatgaacacgtccctgatcctggggtaggagagggatgagccatacagtttccttctctggaggtgacccactcttccagtacttgctaagggacttgacatgcttgtggggtgcagaatgtattcctgtgtgtgtatgtgttcatgaatcagacactaaccctgtctcaaaaagctcatagtttagtcggcatgatacaacgaaaaccctgttttctatttgcttctctggttttctttctttctttcttatttttttgagtcagggtctcactgggtcacccagtctggagtgcagtggcacaatcactgctcactgcagcctcaccctccagggctcaagtgatcctcccaccttagcctcctgagtagctgggactacaggtgcacaccaccacgcctagctgattcttaattttttatttatttatttatttattttttgagatggagtctcgctttctcgcccaggctggagtgcagtggcacaatctcggctcactgcaacctctgcctctcaggttcacaccattctcctgcctcagcctcccgagtagctgggactgcaggtgcccgccaccatgcccagctaattttttgtatttttagtagagacggggtttcactgtgttagccaggatggtctcaatctcctgacctcatgatccgcctgcctcagcctcccaaagtgctgggattacaggcatgagccactgcgcccggcctaatttttaaacattttgtagagatggggtcttgctatattgcccaggctggcctcaatctcctgggctcagtggtcctcccaccttggtttcccagtgttgagattacaggcgtaagccatcgtacccgctgcttttgtggtttcctttgttctctctctctttgtctacttctgttcatctttttcttttcatcattactttgtatctctctcttttagtcttcctatatttgttttgttttttttttgtttttgagacagtcttgctctgtcgcccaggctggagtgcagtggcgtgttcttggctcaccgcaacctctgcctctcgggttcaaacgactctcatgcctcagcctcctgagtagctgggactacaggtgtgtatcaccacgcccggctaatttttgtatttttagtagaggtggggtttcaccatgttggccaggctggtctcaaactcctgacctcaggtgatctgcccacctcaccctcccgaaatgctgggattacaggtgagagccaccacacccggcctatttctttatcttttagcaattctatacctgtctctgtattagtcagggtaggtcaggattttctgcagtaacaaagagcccccaaatcttagtgacttagaacaacaaaggattattttgctttatactacacattggtcacaggtcagtggtgggtcaagggctctgcttcatgctgtcttcactcagggtcccaggctgagggagcttccatttcttttcttactccctcccccactggggaacaaacgtggcgagtcataaactggctcttaaggctcctacccgaaagtgacacttctgctcccagttaattggccaaagcaaggccaggtgtggtggctcacacctataatcccagcactttggagaccaagatgggaggattgcatgaggccaggagttcaagaccagcctgggcaacatagcaagatgccataaagtagctgggcatggtggcacacgcctgtagtcctgactactcaggaggctgggatgggagcatcgcttgagtccaggagttggaggttgcagtgagctatgatggtgccattgtactgcagtctggctgacggagtgagacccggtctctaaaacaaaacaaaacaaacaaaaaacaacaatccccagttcaggagggcagggacatccctgaactaatagctggagctatgtggtgaacagctgtcatgactgccacggtctctgtcgctgtctctgtctctctgtcatcactatgtcatctgcctctctgtttctgtctctctctgtggtccatctccatccatcaactcctgcctctataattttccccaaaaggtctgacctggtttagggacagagatggggcttccaatatttgacactggtccctacataatggcttatgcctgaaaccccaacactttgggagactgaggcaggtggactgcttgaggtcaggagctcaagaccagcttgggcaacatggtgaaaccccatctctactaaaaatacaaaaattagccagacatggtggcatgcacctgtagtcccagctactcggagggtgaggcaggaggatcacttgaacctcggaggcagaggttgcagtgagccaagatcataccactgcactctggactaggtgacagagaccctgtctcaattaaaaaaaaaaaaaaaagaagatttggaactgtgtatgtgcagtggaagatgtaagggttgtttgttaaaccacaacaaaacctagcctgtccttactcataagatccttactcataagagaaggacagagagacatagatacaaagaaagtgatgacagaggggagaaatgggcaaagaatttcccctatcttgctgagggctttgggcgatcatgtgattgccgaactaagtggggctcactcaccccaacaagcctgggaacagtgatcccaggaagcccctggccctggaaagactgcaggtcccctttcgttccctctcatggcagcacctctagcccctgccttccctggccttggccctgaccccaccctgctctgctccctacagagcaaaccctggaagaagctgaagacagttctgaagtattcaccctttgtggtctccttccgaaaacactacccttgggtccagctttctggacatgctggtaagtggggtggtggtggacagagctgggcagagtctcctgggccagggaaagggatgttctctgtagtttagttcccccacctagtgatgggcttggtgacagtccccaccttatgggactgttatgggcagtgcttaggcctgggcctggcccttcgtatgtcagggcagagggctattccttgttattctggtggagagagggagcttcagacggacctgagctcaaaccctagttctgctctgtattcatgggtgaccttgggcaagttactttcctttactgggcctcagctgccccatctgttaatgtggagataaccttacctcccttgcaggattaaccgaagagttaaaatcaaaatgtatataaagattgaggccaggcacggtggcttacatctgtaatcctagcactttggcaggccaaaacaggaggatcgcttgagcccaggagtttaagaccaacctaggcaatatagtgagaccccgtttcaattaaaaaaaaaaaaagattggctgggcgcagtggctcatgcctgtaatcccaggcctttgggaggccgaggtgggtggatcccctgaggtcaggagtttaagaccagcctggccaatgtggtgaaatcccttctctactaaaaataaaaaaattagccaggcatggtggcgggtgcctgtaatcccagctactcaggaggctgaggcaggagaatcacttgaacccgggaggtgaaggttgcagtgagccaagatcgcagcattgcactgcagcctgagtgacaagagcgaaacttcgtctcaaaaaaaaaaaagactgaggcacaggactcttatgaatggaaatgatcactccttgccttctccgcgtgttcagagcatagcaggccttcagtaagtagcagctgtaacattttgcccccaggaccttgcaaatgcctgcagcacagagtagcacaatggtggcatatagtgctcttttgaaaggctaggccataaatatcttaggttttgtgggcctatggtctctgtcgcaactactcagctctgctgttacagcaggaaagctgccatagacactatgtaaacatatgagtgtgtctgtattccaataaaactttatttgcaaaaaccagcagcaggctggactagaaaagtgtgcccattggcaaatggcgacagtaagagaatttgtctgccttgtttgtctttagatctgacctggaaataaggcaagaccccctaaaactgtgtcaacacaagtttgccatctatatgtgttctggttactattgctgagtttattaaaaaaacaaaactcagcagagcacagcggctcatggctgtagttctagcactttgggaggctgaggtgggaggatcacttgagcccaggagtttgagaccagcctgggtgacatagtgagaccttgtctctacgaaaaataaagaaattaactgggcatggtggcatgcacctgtggtcccaggtacttgggagctgagggtgggaagatcacttgagtccaggaggtctgggatgcagtgagccttgatcgcaccacagtactctagcctagatgaccgagtgagaccctgtctcaaaaataaatacgccaggggcggtggctcacgcctgtaatcccagcactttgggaggccaaggcaggcggatcacgaggtcaggagatcgagaccatcctggctaacaaagtgaaaccccgtctctactaaaaatacaaaaaattagccgggcatggtggcgggcgcctgtaatcccagctactcgggaggctgaggcaggagaatggcgtgaacccgggaggcggaggttgcagtgagccgagatagcaccactgcactccagcctgggtgacagagcgagactctgtctcaaaaataaataaataaataaaataaaataaaataaatacaaaacaaaacccaaaaaccccaagacttagtgatggttaaaaaaaataacttagtagaataaaacaatcattttattgacctcagaagttttgggtcagcaattcagacaggatggcagggatggcttttcactgctccacaatatctgggaactcagctagggacacctggaggctacaagctgaaaacttttggaggttcattcacttgcatgcgtggtgattgatgctggctattggctggggtctcagatggggctgccacgtggctttgccatgtagctccttgagcttcctcacagtatggtggcctcagagtactcagatttctaacaagacagctcaggactaccttgaaggtaagtgtctctgccaacagaagtcatgcagtagcacttctgccataaaccgtcccatatttaatgggagagcaatctattttttatttattcatttaattttgagataggatctcagtgttgcccaggcgggagtgcagtggtgcagtcatagctcattgcagccttgaactcctggccttaaaggatcctcctgcctcaacctcccagagtgttgggattataggcatgagccactgcacccagcttgggagagcaattaagagtatactccttgatgggaaaattctataagagcaggatcaggaatgggtctgagacccactgtgatcaggagatactgttgtagccaactttggaaaatgtaatccaggctggacataatcacagcactttgggaggctgagatgggaggatcatttgaggccaggagttcgagaccagcctgggcatcatagcaacactaccccaacccgacattacacattttttttttttagattagctgggagtggtgggggtgcacacctgtagtcctagctactctggtggttgaggtgggaggatcacctgaatctaggagcttgaggctgcagtgagctatgattataccactcaatttcagcctgggtgacagagtgagatcctctcaaataaaaaaagaaaaagaaaatataatctgaaaatacagctggccactagaagaaattagaattattataatctatacactctgcgtggtccaggaaatgcttgatctataaattaacttaaataggccctggttgttagcaccttgggattccaggcagcagcaaaagcaaatccactctggagagtgacgctctggacttagatctcacagaattcccacagatgatcacatgtgtacaatcaaaaattacaaaacaaattaggatatcctgtgctgggaacaggacttggtttaagcaacagagaacagaaattcgccctttccttaccaacccctgggcaagacttttaagagttgcggcctgggcacagtggctcacgcttgtaatcccagcactttgggaggccaaggcgggtggatcatctgaggtcaggagttcaagaccagcctgaccaacaaggtgaaaccctgtctctactaaaaatacaaaaattagctgggcttggtggtgtgcacctgtaatcccagctacttgagaggctgaagcaggagaattgcttgaacccgggaggcggaggttgcagtgagccgagatcgcaccattgcactccagcctgggcaacagagtgggactccatctcaaaaaaataaaataaaatcttaaaatcattaaaaaaaaagttgcagggagagaaagcattgcaggagggtcgggcaagataatggtggccaggatctgatgcaaacaggcagctgcggagaggttctcttcctgatccagttcctgatcctctcatttattctaccacctttagggaacttccaggcaggagaggatggtcggattctgaaacgtttctgtcagtgtgagcagcgcagcctggagcagctgatgaaagacccgctgcgacctttcgtgcctgcctactatggcatggtgctgcaggatggccagaccttcaaccagatggaagacctcctggctgactttgagggcccctccattatggactgcaagatgggcagcaggtggggctggggcagccctggggcagggatggagggcagggggtgggcattattgaaaatattggcctggccaggcgcggtggctcacgcctgtaatcccagcactttgggaggccgaggctggtggatcacctgaggttgggagttccaaaccagcctgaccaacgtggtgaagccctgtctctactaaaaatacaaaaaattagccaggcgtggtggtgcatgcctgtaatcccagctactcaggaggctgaggcaggagaattgcctgaacctgggaggtggaggttgcggtgagctgagattgagccattgcactccagcctgggcaacaagagtggaaccctgtctcaaaaaaaagaaaagaaaagaaaagaaaatagcgccaagtccattttcaaagtggttgtaccagtgtaccttcccaccaccatgtatgagtgttacagtcgtcccagattctcaccggtgcttggtactgtctgttttattaacttaaaccattccgatgggtttggaataggatccctttttttcctctttgagacagagtcttactctatcgcccaggctggagtgcagtggcacgatctcggctcactgcaatctccacctcctgggtttaagtgattctcctgtgtaaaccaagtagctaggattacaagcgcccgccaccacacctggctaatttttgtattattagtagagatggggtttcaccatgttggccaggctggtctggaactcctgacctcagatgatccacccactacggcctcccagaatgctgggattataggcgtgagccaccacgcctagtctgcaagaagtgaactctaattgctttctccagctgggttcagtggctctcacctataatcccaacactctgggaggctgtatacacacacacacacagacacacacacacagacacacacatagtcttcaactctcccatttcattcttttagtagtcttttgataaacatatttttataaacaaaatagtatttgtattattactcttttttgagacagagtctcattctgttgccccgactgaagtgaaggagcatgattatagctcacagtagccttgaactcctgggctcaggcggtcctttcaccttagcctccagagtagctgggactataggtatgtcccaccaggcttggctatattttattttttatagagacatggtctccctgtactgcccaggctggtcttgaacccctgagctcaagtgatcctccttcttctgccccctgagtagctgggactgtaggtgcatactatcacacctagctaattttcaattttttgtagagacaggctatttaggaaaagctctgaatccatgcttttccgttctcacaccactgccacaacaatgagagcacagaagacttctgtgaccaaatgtttaggttttttaaccccacacaccaagcaacggacaccagctggatgtcctccaattcaagtctaaaaccatctacctggaaatagtgtcagatcccacaggttggggactcagtccccaagactgccccccagttacagacaccagtcataagttcaggccttcgaaacttctgactgattggctccaagttggagttcccatgtcctcctctttgggttcaaataatttgctggagtggctcaaataactcagggggatacttacttacctttactggtttaatataaagcaggggtccccaacccctgggccgcagaccagtaccggtccatggcctcttaggaacggggccccaccgtaggaggccagcgagcattaccgcttgaactccacctcctgtcagactagcgggcaggagattctctggagggcgaaccctattgtgaactgtgcctgcaagggatctagattgtatgctcctatgagaatctaattgatacttgatgacctgaggtagaagagtttcatccagaaaccatccccctcacagtctgtgggaaaaattatcttctacaaaaccagtccctggttgggtactgctacaaaggatactgcaaaagatgaagagaagtgtagggcaaggtatgggggaaggggtacggagcttccatgccctccctgggcgcaccacgctccaggaacctccacagggtcagctatctggaagctcctgagcccaatccttggtttttttttttttttttttttttttgagagggagtcttgctctgtgtcccaggctggaatgcagtggcctgatccgcccgccttggcctcccaaagtgctgggattagagatgtgagccaccatgcccagcctaatccttgggtttttatggaggctttaagacaccagcattccttcccccagagtatagggtgggatcctctctggggagggtcctaagacccacagtcaggaaggtggggaaagattagagtcctgccttggggcaggtgaaaggagggcaggaggaggtcagagattttggtttcttgagccagcttctgagatctaacacacctaaaattataacaaaagattgtggctgggcgcagtggctcatgcctgtaatcccagcactttgggaggccaaggcaggcagatcacttgaggccagttcaagacaagcctgggcaacatggtgaaactctgactctactaaaaaaatacaaaaatgtgccaggtgtggtggtatactcttgtaattccagctactcaggaggctgaggtgggaggatcacttgaacccgggaggtcctagaagttgcagtgagccaagatcacgccactgtactccagccttggtgacagagcaagactccatctcaaaaaaaaaaaaaaaaaaaggctgggcgtagtggctcacacttgtaaatgggaggcagaggcaggccgatcacgaggtcaggagttcgagaccagcctggccaacatcgtgaaaccccatctctactaaaaatacaaaaaattatccgggtgtggtggcgggcacctgtaatcccagctactcaggaggctgaggcaggagaatcgcttgaatccgcgaggcagaggttgcagtgacccgagatcaccaccattccattgcactctagctcgggcgggcgtcaaaaaaaaaaaaaaaaaaaaaaaaaagattgtaacaagggctatgagagttaccagccaggaaccatagagggaaaccaatatacattgtaactaacaccgggtctcgctatgttgccgaggctgatcttgactttctgggctcaagtgaacctcctgccttggcctcccaaagtgttggggttacagatgtgaacactgcacctggccctacctttaatttagtccagtttgtcagtttttttcattgtgtttaagaaatcttttcctactccaagatcatgcaaatattatgttttcttctacaagctttattgttttagctttcatatttagacctacattccagatagaattaatgtttctgtgtgtgggaggtagggatcaggttcatttttttccatatggattgttgacccagcactgtttattgaaaagacttccctttccccactgaattgcagtgcctagtcataactgcacaactctacgtgtgtgtctttgtggactctgttgtattctgtgcattgatttgcccattcttgtgccacactgtggctttatgtcttaatatcaggaagggtaagccctccagtttgttctacataatttcctttgtcacatcctctgtgtgctcaggacctatctggaagaggagctagtgaaggcacgggaacgtccccgtccccggaaggacatgtatgagaagatggtggctgtggaccctggggcccctacccctgaggagcatgcccagggtgcagtcaccaagccccgctacatgcagtggagggaaaccatgagctccacctctaccctgggcttccggatcgagggcatcaaggtgaggaccaggaaccgcctggcctgtcccgggaaggcctatagccagatcccaggcagggcttcttggggaaagccacgagagagtgcaggagacggcgtgggatgaaaggctggggctggggaagcccagcctctttcttacctccatacccatcagagcccaggttctgtttatccgtctgcctgagcatctcctgagtccatcttttcctcctctccttctccatggtcatgtcctagtccagccccatcttctcctgcctctgtctccctgggcatcctggccctggtctccctgcagcacaagagctggagggatccctttcccccagctatggagaaggtttctctttttctttcttgcattcctttttctttgtcaaattaaatataattgtatgaataggccaggcatggtggctcatgcctgtaatcccagcactttgggaggccaaggcaggaggattgcttgaggccaggagtagttcaggactaagctggccaacatagggagcttctgtttctagaagaaaaaaaaattgtttgaatagctagtcacacagttcaaaagtcaaaataatattataaaagggtaaatgtggagaaatttctctcccaactctgctgctgtccttcccattctgtccctctatccctctacctgctcatggggaaccactttgtcagtttcttgtatttcttcctgttagtgccagtaaatggagttgtagatccgaaatgttcctcagtacgcatactgattggtactttgctattttcacttaatagtaacaccctgcagagttttccacatcattccatagaaagcttcctctttctgtttttttttcccccacagctatgtaacactgtttttgtgactgtgcctggtcccctatagacagacacctgggttgtttccattttttgccattagcaggcctcaaagaatcactttgtatataagacattttgcaagtatgcagattgagctgtagatttccagaagcaggactcctgggtcaaagcttaaaggcatgggaaatttgcgagagatgaccaaacttccactctcggtgttatgccactgcacatcccaccagcaatgtatgagaatgcctgttgcagatccgaccatgccattctcctgttcgaaacccttctgtggctccctagtaccttgaagtgaagttccatagcctgtagggccctctaggatctagcctcttctctctcattcttctcttttcttttttttttgagaaagagtctcgctctgtcacccaggctagagtgccatggcacagtctcaactaattgcaacctccacctcttgggttcaagcgattctcccacctcagcttcctgacttgacgtgattactggcacgcactaccatgcctggctaattgttgtttttttttttttttttgagacagagtctcgctctgttgcccaggctagagtgcagtagtacagtcttagctcactgcaaacctctgcctcccgggttcaagcgattcttctgcctcagcctcccaagtagctgggattacaggtgtgcaccaccgctcctggctaatttttgtatttttagtagagacagggtttcaccatattgaccaggctggtcctgaactcctgaccttgtgatccacccgccttggcctcacaaagtgctgggatgattacaggcgtgagccactgtgcccggcctaatgtttgtatttttaagagaggcggggtttcactatgttgaccaggctgatcttgaactcctggcctcaagtgatctgcctgacttagcctcccaaagtgcagggattataggcgtgagccaccacgcccaacctctcattcctctcattctttctgtgtaccttcaggcacagtgaagcacttgcatttacttgaaataggcttgctttttcctgccacaaggcctctgcacccctctgccaggaatgctcttctattttttttttttttgagacagggtctcactctgtcatcccccaggctggagtacagtggcgcgatcacagctcactgcagcctcaatctcctaaactcaagtgatccccccacctcagtcttttgagtagctgggacacaggtgcgtgccaccacaccctggtctcttccgtctgtgccccctggtctggttgattctcagtcatttttctgtctcctttcaaattttgcttcctcagggaagccctccctgatttctgttctactgatcagggtcccctcttcacctcctcatagctccttatactctttcattattcttatcttcctttctgatcatcttaatcagtgtctgccccctcatctgactgtgtctgtcgtgttactccctattgccaagtgcccacatagcacctggcacagtgtggcagatgacttaggtgggttctctgagccctactgaaacataacagataacattagtctcattagtctcaaataactatatgccaggcactgtgctgtgcatcctacacacctggtttcctctaatccttacaccagccttagcaagtagacaccaacacaattcccgttttccagatgaggaaactgaggctgaggcagctgaaatgacttaagactgcccagctagaaaagagcagagatggccaggtgcagtggctcacgccagtaatcctagcactttgggaggccaaggcgggcggagcatgaggtcaggagatcgagaccatcctggctaacatggtgaaaccccgttgctactaaaaatacaaaaaattagccaggcgtggtggcgggagcctgtagtcccagctatcaggaggctgaggcaggagaatggcatgaacccagggggcggagcttgcagtgagcccaggttgcaccactgcactccagcctgggtgacagagtgagactctgtcaaaaaaaaaaagaaaagagcagagtcacgattcacagccagctccaccctgctccaaagcccactttcctagatgggttcaaccaggaggttcaaggttggaagggtgtggaaggactggggctcaggcatgtgacctggggctgggttgagctgggctgggcaggtaagctggcttcctcctctggcagcaagtgtgcaggcaggtgggtggccctgggaagttgttttttttgagacagagtcttgttctgtcacccaggctcgaatgtagtggtgcaatcaatgctcactgcaacctctgcctcccgggtttaagcgattttcctgcctcagcctcccgagtagctgggattacaggcgcccgccaccacacttggctaattttttgtatttttagtagaaacggggtttcaccgtgttggccaggctggttgtgaactcctgacctcaagtgatcctcccgcctcggcctcccaaagcactgggattataggcatgatcccacacctgggaccacaggtgcatactaccacaccagaattttttttttttttaaatagagatggggtcttgctgtgttgcccaggctggtcttggccaccgcgcccggcctcctgggaggtatttgaggttgctgggtattgggtgcgggaaggaaaagcccatgaccctgcccctccacaccctgccctacagaaggcagatgggacctgtaacaccaacttcaagaagacgcaggcactggagcaggtgacaaaagtgctggaggacttcgtggatggagaccacgtcatcctggtgagtgggacacccatgtcccagaatgtagcagcttaagacagccaccatttattcttgctccagagtcagtggtcttctgctttgggtggggctggactgatactggctggctttgctcagtctgaggtcagctggtggcttggcaaggctggctggtccagggggccctgctcccagctctgccggttggctcatgacttggccgcacgtctctcgatagcaggatggcctgggcttgctctcacagtggaggcagggggccaagagaacaagtaaaaatgcaaggcctcttgatgcctgggctcagaatggccaccatcatttctgccgttcggcaagtcatgtgacccagcctggatcgaggggtctggagacagactccgcctccggatgggagtggaaattcatggaatccaccactcttctccatgccaccttgatgaatccaagccctcactcctctgccctgtcttccccatggctcccctattccatcctggctagagcctgcctgctcctttgggggaatggggtgaggtcagagctcaaggtgggcaaggccccacaaagtccccatgctaaccaaagaacgctccctgtcacacagcaaaagtacgtggcatgcctagaagaacttcgtgaagctctggagatctcccccttcttcaagacccacgaggtgcgagccctggcttccatgggtggatgtatgggtgtcggggtccaggtgcatggaggggaaaccattgatgagttacaggtcaaagatataaaaaggggctgggcgttgtggcccgcacctgtaataccagcactttgggaggctgaggtgggaggattgctggagcccaggagtgccaagaccagcctgggaagcacagcaagaccccgtctctatttggaaaaaaaaaaaaaaaaaaaggccgggtgcagtggctcatgcctgtaatcccagcactttgggaggctgaggcgggcggatcacttgaggtcgggagtttgaggccagcctggccaacatggcgaaaccccgtctctattaaaaatacaaaaattggctgggtgcggtggctcatgcctgtaatcccagcactttgggaggccgaggtgagcagatcacgaggtcaggagatcgagaccatcctggctaacacagtgaaaccccgtctctactaaaaaatacaaaaaattagccgggcgtggtggcgggcgcctgtagtcccagctacttgggaggctgaggcaggagaatggcatgaacccgggaggtggagcttgcagtgagccgagattgtgccgctgcactccagcctgggcaacagagtgagactctgtctcaacaacaacaacaacaacaacaaaattagccagaaattgcttgaacccagtaggcagaggttgcagtgagctgagattgtgtcactgcactccagcctgggcaacagagtgagactctgtctcaaaaaaaaagcaaagctaggcatggtggtgcacacctgtagtctcagctactcaggaggctgaggcaggaagagggcttgagtccaggaggtcaaggctgcagtgcattttgattatgcctcacactgaacatttgctgtgtatttgctatgtaccaagcactgtcttaagcacttaatgtagattaattcctacatataatatgcccagcagcctctgaggtaaatgatcctacagtcgaccccttatcctcaggtgatctcctccaaacccccagtggatgccggaaactgtggatagtactgaactatagactgtgttttctcgatctgataaccaagatggctcctaggtgactagtgggtgggttgcggatacagcatagacttgctgaacaaagggatgattcgcatcccaggtgggacgaagcgggatggcacgagatttcatcacagtagttaaaccaatgtgcaacttaaaacttacacattgtttgtttctggaattttccacttaatatttttggatcgcacttgactgagagtaactaaaaccaaagaaaatgaaaccacggactggggagactaactgtattactctcactttgtatatgaggacgcagaaccacagagaggttaagacacctgcctaaggctgcacagacaggaggtggcacagccaggatatgaatcaggcagccaggctccagggttcatgctgtcaatcaccctgctctgctgcctgtcaggaagggaccttggccagtgcctgctcctcccttaacctcccgtctctaccccggcaggtggtaggcagctccctcctcttcgtgcacgaccacaccggcctggccaaggtctggatgatagacttcggcaagacggtggccttgcccgaccaccagacgctcagccacaggctgccctgggctgagggcaaccgtgaggacggctacctctggggcctggacaacatgatctgcctcctgcaggggctggcacagagctgagctgctcagccaccatcaggttaattggatggcgccagtctggctggaggagccctgagatgccatgggaggcctgaggttggccacgggggagctggcctccagggacgggagagattgtgtcatgtgccacacgagaccaacgtggaaaagtctgaagggccttgggagaccaggtagcacctggccccatcatgatgcaggggttttggggacctggaaggaaggtgatgaggcagtgagtcagaaaaaccagaacggggtccccggatctgccgggaaggcttctgaggggctgccctgagagcattcagttcacatgtcacagggtatggtgtgacagggtgcctgtggacacatgaatcacttctaacctgcctccctgtcagcctccaggctgccagctggctgaggccagggactgggtcaggctcatctgtggcgcctcagagggtcagcatcattggtgaacagatgcaggcgctgctggaccatctggggagagtgacagtccatgtcttcaccagggagccatttgagtgctgagcgacaagaggctcagagggcatgaccccatgggactggatgcggcctgagggctgataccgctgggcggtatcctgccctgctgtggccctgtgggatcctccgtgttcctcggcggactctgctgacctcctgcagacccaaaccacagccacatcccagcttctgtgccagcactgtgacagtacctcgctcctctgtgcaccagatccggcctcaggacttacacctcctgcctgacccccaggcttctctctcctttctcccagcaaactgcagtggcagaaaggaggttcagaggctgggaaagtgggcctccccttgcaactcagagctgctgcactcaggagggccccatccaatcccgggcccctgcagggaaaagcgctgggtgtgtgtcagaggcgcagggtgggtggggctgccagccaggaccctggcctgcagcctgatccaaaccaaagactgtagaaccctggggtgtggctaacggcccctccagcacccatagccaggtcttcctggcccttgaggctgggctggcggacaggcacctacctcttccttaagctgaagctcccacactgtcttccagggctgaggagatgctctccttttctactgaccatcttgatacttatttatacgagaggcagttgctggacggggtagtactgggaagcaggaggcagaatggctctgctgagcctcctacccatgacaacaccccaataaacagaacattcagagccaatgtcgtagagctttttattttgcatctggagtgtatttggacacgtgggctgggtggggtaacaggataatgagcagtttgggaaagaggcaggctccaagcaggctggttcactcacttggcagtcactgggcggctattcttgtgcctggatgtgttacaatgcaggggacacagtggtgagcaaggctgctccaagccctggctgggatgggggatgcacagacaggctgatcagggctgggatggtggacacgcatcctctttaccctgatcactggttagaaatactgcactgtggccgggctcagtggctcacacctgtaatcccagcactttgggaggccgaggcgggtggattactcaaggtcaggagttcgagaccagcctggccaacatggcaaagccccgtctctactaaaaatacaaaaaattagccaggcatggtggtgcatgcctgtaatcccagttacttggggggctgaggcaggagaatcacttgaacctgggaagtggaggctggagtgagctgagatcacgccaccgcactccagcctggacgacagaacgagactccatctaaaaaaaaaaaaagcaacagtgctctgtagtttccctaaatgagatgggctcagttagggacagagaagtgatccagacaggcctgttcctccttcagagtggaggggtcaggtattcatgaagctagtaatcacacacactcactagaagtttgtataagtggacaggaaagtttgtggtcagcaccataatgttcagggagccaggagacagcctggctgagatactgactacctagcttgaatcctgaccttgccatgtgctagtcatgtgacctcaggccagtgattccacttctccaggcctcagtcttgccatctgtcaaatcgggtccatctagcaccccccttacagggttgccagatctgctaacacaggtagaggggctggcacaggtaactgctcccagatgggctttaaaactgtgaagacatgaggtgggggaggggtgtcttgactggggctgcaggactcttccctgaggtagtgatacctgagccccaatggaaaagttaaggagtgatccgcagcagagggctgggggtgggactcaatgatccggggatttgaacaacacttcagggatctaaaaggccagtatgactagtaggtggcaagcatgaggaagaccttgggctaaggaggggtgagctgaggctgacgcagttcagtgtccctgtcctgtgagaagcagagggcccaggcaggaggttcctcaaatgtctagtgagatgacagaggcggcccctagtgagaaacagacgatgcgacattcagatggaataggcaggccgcagggtccgggctgttgtcaatctctccctagagggaccagctggtgctcaatactgcagggggtggccctgatgaaggaggactggagacccctgagacctagcttcaatcttgtcgccatcacacagtgggagaagtgtaggcacacttcaaatggttaccgagctaggctgcagcctgagaccgcagccgcagctaatggctgcagtcctgtggtgtgaggagcagggcctggccacagaggccagcccgtaccccacccacgggcaccacgtacacccggccgtcagtggcccgtgagggcgagaagtccgtcagctgcaggttgctctcccggacctggtcgtagtcccacagctgatagtgccaactcttgccctgcttggacagcaggtagacagctcccggggagccctcctctggcagggatggtggttggcagggcgtgcccagcactgggtggaacaggcccggcagctcagggtcctcagtgtagccgagactgggcacagcccgaacacccagcaggacccctgggggagaggagaaggtggtgagtggcagtgactgagccaggaccaggtgctggggctcactaagttccgccctctcccggccctccagggtgggtgcagctgccattcctaggttacggtgacgttagtggtggccagtgggttgggatttggacccaccgtggcacccggctccaaagctgtaggtgttttaagtcttgcctcatctggcctgagcacaggggaggtggggaggcagcatgagatgaagcaaatgccgtcacccggtcatcctcagctctttagggaagaggctccaagaggagctgtcaagaccacaaagccatgaagaagctgagcggagcctcccccggacctcctgacgcggaccaacctggccttctttctttcaggcagggggaatgatgaaaacggtgctggtaatacttacagagacatgtcacacgccaagccctgttctattttttttttttttttgagatggagtcttgctctgtcacccaggttggagtgcagtggcacgatctcagctcactgcaacctccgcctcccaggtccaagcaattttcctgcttcagcctcccaagtagctaggatttcaggcatacaccaccacgcctggctaatttttgtatttttagtagagacagggtatcaccatgttggccaggctggtctcaaactcctgacctcaagcgatccacccaccttggcctcccgaagtgctgggattacaggcgtgagccaccgcgcctggccaagccttgttctaagagtgctgagtgctctgcctacaaggcagccttatgaggtgggtactgttacccccaatttccagatggggaaaggagctgtccagagaggtgatgatacctgcccagagtcacagagcctagaagaggctgtgccaggcctggagcccagacggtctgatcctgaaatctgtgctctgagcttctgtttgtagaagctccaactggcagacacctggggcccagcctgcccggtgctaatgctaagtgcccagcctggctggggaggcaccagcacaaggggtgagaatgtcaggaggattaatggaggccggggagacccaggttgaggggtgcagacaaaggagggggaacccacctgcactcaccgcccagtgtgccttgtggcccttcctctgacacggctcatggttgaagtcctcgtcgtagctggtgctggcattaaggtaaaaacgatggtgtggccctgggacccaccctttgccacccctgccctcctctctcccaggccctgggatacgggatgagcaggggatgtccagtgaccaggtgctgcaggacgaggtctctgttgggaccgcccaggccaccagagagcagcttggcctggcagcccagcacctcctgggccagcctgcccatatcggccactgcagggtgagagcacacagagggggcttgctgcatgtgcccagcaccgtgctgagggctcacagtgggcgatgcttccaaccctcaccatgaccttccaccccttggtacaaatgcagaaaatgaggcacaaagagcgtgagtggcttgtccatggccccagcgaagaggtggcagagctgggtttgcaacctaggcagccagctcaagtccatcttgtaacctctctgctctactgggcagtgggaagggcccaaagaatggaatgagacaccctgacacacggctgccagcatcccacccagcctctctggtcccagcctcatgaagagatgatggagcatgcagtcacccagctcacctgagaacatctctccctgggccgtgtagcctctttccgtggccacccgtatgagtctctccagggggacgccactggggggcgacaggagagtacctgccatccacaaggccaccagcccgcatctggggacagagaggcccagcctgtcaatcctatgtcacagcccccttacctggaagctggagttggggaacaggtttgctgccctggaggagtccccctcccctctcccaggccagcgagggagacctgactccccttcaggggagagcccagggctggagggctgggggtggaaggcgggggagaggtcacctgagcttcctgggaggaggaaccaaggtggagttagagagatggaccaggctcattcgttcattcctcgcatgtcccaactatgtttactatgcaggcactcagaagcctgagtggaaagttccccctttccttccctcctcctcccagcagggacaatccactcctcttctccagatcagtccttaagaagcccagcaagggcagagtaaaggcagcagatgggctggggttcccgcatcagggcacatactgagggccttcttggatgagggacggcaggtctgcacagaagaggatccaccgcaggtcacctcggaacctgaagcagagccgtgctcagtcaccagggagccagctctgaagcaccccctaccctgaggtctggctgggagtggtcgtatccagggatgatgaagggaatatgggcctggctgtcctaaggctgaaggcggctcctggttcagtcactgacttcccctccccaagcttcagtttcctcatctggtttgtgggaatggtccttctgcctgcctgctccctgctcgctctctcagttattgaagggtgaggagcaaagggtggcactttgcaaccaggtttatctgaggaaatttctcaaagtggtatctctatctccaactctttttcttgctctgttgcccaggatggaatgcaatgatgcaatcaaagctcactgcagcctcgacctcccagggtcaagttattcctcctgcctcggcttcctgagtagctgggagtataggcatgcaccaccatgtccagctagttctttttattttattttattttgagacagagttttgctcgttttgcccatactggagtgcaacagcgcgatctcagctcactgcaacccctacctcccgggttcaagtgggtctcctgcctcagcctcccgagtagctgggattacaggcatgcgccaccacgcccagctaattttgtatttttagtagaaacggggtttcaccatgttggccaggctggtctcgaattcctgacctcaggttatccacccaccttggcctcccaaagtgctggggattataggcgtgagccaccgtgcccgactctttttatttttagtagagatgagatcatgctatatgttgcccaggctccaaactctgtgatttgtttttcgcttcaagtctgtttcctgggctgttcaacaatgaaaatcccttaactgaactttgaataaaaccaggtaacaacatgcttaaggcctaaaacatcaccttgatagtgaatctttgtaccctgggggaggccactcagatagtctggccctgagggattcattcctttttgtttgtttgtttgtttgttttttgggacagagtttccctcttgttgctccggctggagtgcaatggtgcgatcttggctcaccacaacctccgcctcctgggttcaagcgattctcctgcctcagcctcctgagtagctgggattataggcatgcgccaccatgcctggctaagtttttgtttttgtttttgtttttttttgagacagctggagtgcagtggcccgatcttggctcactgcaagctctgcctcccgggttcacgccattctcctgcctcagcctcccgaatagctgggactgcaggctcccgccaccacacctggctaattttttgtatttttagtagcaacagggtttcaccctgttagccaggatggtctcgatctcctgacttcgtgatttgcccgcctcagcctaccaaagtgctgggatcacaggcgtgagccactgcacccggcccttttttgtatttttagtagatacggggtttctccatgttggtcaggctggtctcgaactgctgacctcaggtgatccacccgcctcagcctctgaaaagtgctaggattacaggcgtgagccaccatgcccggcctccttttttttgttgagatgcagtcttgctctgtcgcccgggctggagtacagtggtgcgatcttggctcactgccacctccacctcctgggttcaagcaattctcctgcttcagcctcccgagtagctagaattacaggtgtgtgccaccatttccggctaatttttatatttttggtagagacagggttttgccatgttggccaggctagtctcaaactcctggcctcaggtgatctgcctgccttggcctcccaaagtgctgggattataggcatgagccaccgtgcccggcccatgcttattattcctattccaaggctggtaagaaggcaaggttcggtttgggtgttgggggggtgcggactcagagctcctggttcctagtttagggtaccctcctgatgaaagatgataccacataagtatgattaaaagcatggaggccgggtgcagcagctcacgcctgtaatcccagcactttgggaggctgaagcaggtggatcacctgaggtcaggagttcgagaccagcctggccaacaagacgacagcccgtctctactaaaaatacaaaaaattagccaggcgtggtggtgggcacctgtaatcccagctactcaggaggccgaggcagaagaatcgcttgaacccgggaggcagaggttgcagtgagctgagatcatgccactgcactccagtctgggcaataagagcgaaactccatctctaaataaataaataaataaataagcatggagccaggctgggtgcggtggctaacgcctgtaattccagcactttgggtggtcgagacaagaagatcgcttgggcccaagaattcaagacccagcctgggcaacacagcaagactctatatctacaaaaaaatatatatgtacaaaaaactagccgggcatggtggcgcacatctgtggtcccagctattttggaggctgagatgggaggatcacttgagcctgggaggttggggctgcagtgagctgtgatccagctactgcattccatcctgggcaacagagcaagaccctgtcccaaaaacaaacaaacaaacaaacagcttggagccctgccgccagagttcaaattggactcttcctctttctgcactatagctaaggggcattatagctaaggggcttcacttctatgagcctcagttttctcaccaggaaaatgagacaataaaagtttctacctcatggggttgttgagaggattcagtaaattaatatttaaacacaacagcgcctgacatagggtaaggcattcagtaaaaggtggctgtaatttgcattaaatttgcctcatctcagtgggggcatttagggaaggttataaatgtgtccggaggccaggcccagtggctcacgcctgtaatcccaccactttgggaggctgaggcaggtggatcacctgaggttgggagttcgagaccagcctggccaacatgacaaaccctgtctctactaaaattacaaaaattagctgggcgtggtggtgggcgccagttcactccagcctggatgaaagagggaaactccattaaaaaaaaaaagtgtctggaaagcttggagtttcaatgtgagtcctggcaagtcgcttctccctcttttcttcagccaggcaatcactaaacctcagcctcagggccccagcctaggtctggcactctcctttcccctcccacctgggtccctggatgtcccagtttcctcaaggctcctaagtaccacttccacaggcagcctccttttctgcacagagcctctccagggctcccccgtgccctcaggaaagtctcagtccctttgcacgacccgctctgtcctgcgtgggctggctctgccgctttcacagccccatgtttgccacttcccccggcaagttaaggacatatttgcagttccttgaatagaacatgtcctcatttcactccaggcccctgcgcaagctgtatactctcatcacacagcatttgcacgacttgctcaacagcactcagggttccccttctccaagaagctccccctgactccccagcctgggtcagacacccctctgggctttgtcatgacagccctgaccactctgggttgtcactgtctggaaaggtggagggatctgtctctctcactagactgggcatttgctcttttttttttttttttttttttttgagacagagtcttgctctgtcttccaggctggagtgcagtggcgcaattttggctcactgcaacctctgcctccagggttcaagcgattctcccgcctcagcctcccgagtagctgggactacagttgcatgccaccacacctggctaatttttgtatttttaatagagatgcggtttcaccatattggtcaggcaggtctccaactcctgacctcaggtgatccacccgcctcggcctcccaaagtgctgggattacatgcatgagccaaagcacccggactggactgggcacttgtgaggacagctttcttcattgctggaggcacaccaccatggaagagatctaggtgggggacctaagtagtcagcctgtttgatcttgaggacacgggaaccccccccccaccccaagagatctgtgaagtgtctagggcagagcctgggtggtgggtggggcatggagaccctaccggtccttgtgtagtttcagaagcctcttcacatcttctctgcccttggggaccgggccggccttatcaaaggcctccttcaggagctggctcttctccaggccgaagacatgacggggagcaggccctgtggcagcgggtggaggaggcagtgggagcggtgggggaacaggggtctgctgactccagggaggggatggtaaagctgaaaagtccaggggacttgggggtagaggaggagatggaatgctgctggcttggggtacaggggtttttggaggagaaattggtggttttaggggaggagagcatggagaagtcattttggggtctacaggaggtgttgagaggttcagaaagcggggagggaaggatcctccaacggagaacggtctcagggatggagattttaaaggtttaagagctgagttccagaatctggggactgagcagtgggtgtgaaaggaccagggctaatatttgaaaccacgggagcaggaattgcgaggctgactcaagtcataaggcacctgacggttaacagggtggggtccttaaatccggaaccggatctgtggtaccggttgggttacctcgggagtcttaggtggagagttagtaggagttaactcattctttggggctggatgtggaaactcatgagtgagtttgggatatgaaggctcagatctagagtgaggtgccttaaggatgcgacttagggacccagggctaaagattcggagaacttaggttcagtaccccctcacatcccaggcccgagttcggaacctttgagctgacctttgagtcagaggtcaagaggtcaaaaaggacacctggcagggaaaatggcctagttgtggagaaggtcctggaaccagagcaacaaaaaacgtctgtgggttggagaagactcagagatcagaggccggtgggcgccgcgataaccactggaaaaaggaaaggagtcaggaagtaaagtgcacctcccactcccggaaaatggcggcccccgcacactgcctttcccatatcacgtggtattacacgcaacagttcccgcccattttgcgatcacgtgacagaaaacgcagctctggcgggggtaagaggcgggactccaaaaaggattgcctccggaagacaccgcagcgcgagacgcgtacagactcgtgaccttcactgattggtccgtagacccgggcgccacggaaggaggtgggctttcagggagtggggcggggtttttctacctaggcgggaacccaaatatcgttttgattggcaacagctgagcccagaaacgagacttgctctgattggtcaagctactgcgtttccgcgcggcgattggctggcagaaaggcagaggcggggccaggagagaaagctttgtggtttggtctcagggaagtagcaggcgccggttgagagaactacggccctgtcggaaggtaacctccggtgcaaacgaccatcggcggcaggcgagcggtacgcttggcgtccgggccttcctgggcccgtctgaggaaacttgctgctcgaggccaggctgcctaggacctgtcccttttttctatactggctcccacatccgggttttttctccgggacggcccttcggatgcttgggccaatgggaatcgccatttagggtgctccgcccaccgggtcgcgtagagcatcctggaagtcgtagtaaatctctcgagagttctctccgcacgcgggctggagaagcgggtcctacgcacgctttgttgtcgcgctttgcctccgtccttgcccctactcccgccttacctgacttccttttcggaggaagatccttgagcagccgacgttgggacaaaggatttggagaaacccagggctaaagtcacgtttttcctcctttaagacttacctcaacacttcactccatggcagttcccgagacccgccctaaccacactatttatatcaacaacctcaatgagaagatcaagaaggatggtgagttctcgggatagtccggagtccagactgtcccgcacgggctggcccctcttccgtcccctgcacccgcctctctttctaagtgtttgtccagccaaacttcgagttaactccttggcctttacacaaactacttcctgtcttcaacactccattagttcatcttacactctgccctttaacgtggtcactgctgctcatcttacaaggtttgaggtcacaggacccttcctccaggaagccttgccttgtcccttcacgtggctgccgctgacttgccgtacgctgagaccatctcccatcaagccctgattcctctgagctgtcgtggggctctctctcctcccagtggcctttgaactccgtgagggcaaggactggggctttcttggtcaccggctttttcagtgatcagcccacaatgaacatgtaccataatggtggctaacgctctgtatcatgggctggtctgtgtgctttcatataaatcttgataacatttaattctcacaacaatcttgtaggaagaaggctattgttattcccattcgtcaactaagaaactggggccgggcgcggtggctcacccctgtaatcaatcccagcactttgggaggccgaggcgggcggatcacctgaggtcgggagttcgagaccagcctgaccgacatggagaaaccctttctctactgaaaatacaaaattagccgggcatggtggcgcatgcctataatcccagctactcgggaggctgaggcaggagaattgcttgaacccaggagacggaggttgcagtgagccgagattgcgccattgaactacagcctgggcaacaagagcgaaactccgtctcaaaaaaaaaagaaagaaaagaaaaagaaactgagacaggggtgatgtgacttgcccagggtcacatagcaagtaaagtggttgaggccacccgtatagaattctgcttaggaacccaatttttggccgggcgtggtggttcaggcctgtaagcccaacactttgggaggctgaggcaggaggatcactgaaacacaggagttcaagatcagcctaggcgacaaagccagaccttttctctacaaaaaaaaaaaaaaaaaaaaaaaaggctgggcgtgggtggggtgcgtctgtggtcccagctacttgggaggctgaagtgggaggatcgcttgagctagagaggttgaggctgcagtgagctatgattgcaccactgcactgctgcctgggctgagcaagaacctatctgaaaaaaggaaaaaaaaaaagaactcaattattgaaatcggaaagactctctcacattctcaagtaaattatcacctttattgaacctcattttccagatctaaaaactgagcaaaatcataataccttttttgcatggatgttgggggagattaaattagctaaaccttgcagtatttcttttttatggtaactggcagctagtaaagggctggataaatgttagctcttatcacttcaagaaaattatcgggagaaccgaaggagcttgttgggattcagtttgaggttaccagtgaagttgctgttgaagaaagcaaaaccagcagccgggcactggctcacgcctgtaatctcagcactttgggaggctgaggtgggcagatcatttgaggtcaggagttcaagaccagtctggccaagatggtgaaaccccgtctctactgaaaatacaaaaatcagctggatgtggcggtgcgcacctacagtcccagctactcgggaggctgagcaggagaatcacttgaaccctgggaagcagaggtcgcagtgagctgagaccgcaccactgtactccagcctgggtgatagagactgtctcaaaaaaaaaaaatcaggagtgtaaattttgcatatgttttttttttttttttttttttttttttttgaggcagagtttcactctgtcacccaggctggagtgcagtggcacgatcttggctcactacaacctctgcctcccaggttcaagcgattctcctgcctcagcctcccgagtagctggaattacaggcacccgccaccacgcctggctaatttttatatttttagtagagacggggtttcaccatgttggccaggcttttctcgaactcctgaccttaggtgatccgcccacctcggcctcccaaagtgctgggattacaggtgtgagccaccacacccggcctgcatatgtttttagagtgtggtgcccaaccattatcgggcagtgctggggacacattggtgacatagaaccctggttttttgtttttaaatcttattttatttatttatttatttttgagacggagtcttcctctgtcgcccaggctggagtgcagtggcaccatctctgctcactgcaagctctgccttgcctcctgggttcacgccattctcctgcctcagcctcccgagtagctgggactacaggcgcccaccagcacacccggctaattttttgtatatttagtagagaaggggtttaaccatgttagccaggatggtgttgatttcctgacctcgtgatctgcccaccttggcctccaaaagtgctgggattacaggcgtcagccccagcgcccggcgttttttttttttttttgagatgagacggagtgtcgctctgttgcccaggctggaatgcagtggtgcgatctcagctcactgcaacctccgcctcccgaattcaagtgattctctgcctcagcctcctgagtagctgggattccaagcacctgctaccacgcttggctaatttttgtatttttagtagagacggggtttcaccatcttggctatgctggtctcgaactcctgaactgtgatccacccgcctcggcctcccaaagtgctgggattacaggtgtgaaccaccgcacccggccagaaccctggttctttaggacagtgacagcccagagtagtcagggccatcaggcaggaagcttaggcagagtgttgagggctgggattgggaacttagaaagacagagagatccattcagcttccaggaaaaggagacattttggagagcctgccaggtacagtaagcagtatttatgttacactgagggagaagagcattcttaacttggtccagcttgttcagatgtttagggtcaaaagagcctggcgtattctgagtattacaagtagttttgaggcttgtaaatcatggggaaacttccagtgagctgtgcactggtggctcatggctgtgaggtgttggactttgccctgagggtgttggggagccagactgcttccctgtcctggctgcctccctggtggaatatcctcccagctgtggagggtaaatgcgaatgggcgaggggaggctggagagtagagagaggcccagagtcccgtggaatgagtgaagtctgagcaagattcatggggatggagtacggagaggaaaaccagaaatgtcaccaccaggagaatttttgactaattgcttaaaaacaaccttgactgctgtccctgcccccacccagcctacacattttcttgcttctttcctagcctggtatctattttacaagtggcttctgcttcagcttagcttttttttttgagatggagtttcgatttgtcacccaggctggagtgcagtggcgcaatctctgctcactgtaacttttgcctctctggttcaagctattctcatgcctcagcctccccagtagctgggattacaagcgccctccaccacgcctagctaattttttttcttttcttttttttttttttttttttttttggcatttttagtcaagacggggtttcaccgtcttggccaggctggtcttgaactcctgacctcacgtgatctgcctcagcctcccaaagtgctggaattataggcatgagccaccatgcctggccagtttttatgaaggttggagtccagtggtgaggtcatggctcactgcaacctctgcctcccaggctagagtgatcctcccacttcagcctcccaagtagctatgaccacaaggcatgcaccactatgcctggctaatttttgtatcttttgtagagacagggtttcaccctattgcccagactggtcttgaactcttgagtgcaaaggatctgcccacctcggcctcccagagtgctgggattacaggtgtgagccaccatgcttggccatctcagccatcttctttgcataagacattggtgccctttgcagacctgggtggtgagagggagtccatccttgttgagcttgaatctcacttgctgtcaagtgatgccctttgctggtgagatgtggtggtaccgggttcagatggaatacgtggactgggctctgccatacgcttccttatgccctccagattgatgccctgggccagtgaggaatcctctgagaacctgtttccagtaaaattgggacagtcatagttgccacctaatgggtttgttgtgaggaagtgaagttacctccataaagcatttgatgggggtgcgatgactcatgcctgtaatcccagcactttggggaagccaaggcaggaggatcactggagcccaggagttcaagaccaacctggccaacataggagactgtgtctacaaaaaataaaaaattagccgtgcgtcgtgctgcgtgcctatggtcccagctccttgggaggctgtggtgggaagattgcttgagcctgggaggtcaggcctgtagtaagctaccatcatgccactgaactccaccctgagcagtagaaggagattctgtctttaaaaaaaaaaaaaggcacttgatggtatctagtcaaatgtttgcagccaggtgtggtggcacactcctgtaatcccagcactttcggaggccaaggtgggctaattgctgaagctcaggagttcaagaccagcctgggcaacatagcaagaccctgtctctgcacaaaatccagaaattagctgggcatggtggcatacacctgtggtcccagctactccataggctgaagtgggaggaccgcttgagtccgggaggttgaggctacggtgagccatgatcatgccactgcactccagcctgggtgacaaagtgagaccttgtcaccaaaaaaaaaaaaaaaaaattgtggtggagtctgtgctaggcttggcatactgcagtaaacaaatgggacaggcttatagctcctcaggcaagatagacaagttaacgtaccatgacaggaggtgggaaatagtcatgaaagaaaaggaagtagagtaagaatgacatgggaagaaatttagacgtcgtggtcagaggtggcaacatttcctctgagactgggtgactagaaggaggccaccatgtaaacctcaggggagggatgttccaggtaaagagagcagccagttcaaaggccctggggcaaaattggtgtgtcagacctgggggccagtgtggttgggaactcaggagggcggtggaatgtgggcagggatgaggtgggggaaatctgccagggccacgtcatgcaggcccatgtcagggtgctggtggcagtgaaaagaatcactcatttatcgagtgtttactacgtgccggatgctgtcctgagcactttgcatgtatgtgcacatgttcattatatagcagctctctgtaagcacatcttacagaagagtagaagagtgtacttggccacttgagtggttcctggctgcttctgtgattgttaggtcttgagagattatggacccgaggcattctgggtaccccatcaattggctgatggtcttctatttgggctgcgcttcttctaaaaaggggagctcaaaggtctttttttcccccactgcagagctaaaaaagtccctgtacgccatcttctcccagtttggccagatcctggatatcctggtatcacggagcctgaagatgaggggccaggcctttgtcatcttcaaggaggtcagcagcgccaccaacgccctgcgctccatgcagggtttccctttctatgacaaacctatggtgagcattgcgggtacggaggctgtgtgggtgtgtaaaatgttataggagactgggcgggcctggattagaggaggggatattacggttcatttgccaaggtgaggctggaccaggctcccactgcaccttgcctcatttaaaaatcttttctttggccgagggcggtggctcacgtctgtaatcctggcactttgggaggccgaggcaggtggattacctgagctcaggagtttgcagccagcctgggcaacaccgtgaaaccctgtctctactaaaatacaaaaattagctcggtgtggcagcatgcacctgtagtcccagctactcctgtggctgaggaaggagaattgcttgaacccgggaggcagagattgcagtgagccgagatcctgccactgcactccagcctaggcaacagagtgagactctgtctcagaaaaaataaataaataaataaataaataaataaattattttgagacagaatcttcctctgttgcccaggctggagtgcagtggtgcaatcttggctcactgcaacctccacctcccgggttcaagtgattctcctgcctcagcctcctgagtagctgggattacaggcacgtgccaccatacctggctgatttttttatttttagtagagacggggtttcgccatgttgcccaggctggtctcaaactcctgagctcaagtgatctgcctgcctcagcctcccaaagtgctaggattacaggcgtgagctactgtgccacactaagaatctttaacataccttcccctactgaataagcaccatgaaagaggggtttttgtctattttgttcattgctttattcccagagccttgaatggcgcctggcatctggcaggttctccttaaacagctaagtgagtgagattgaacctggaagactgaagtattcttgtgtgacaggaaatccccctgcactgcactcctctcctagcattgtctcctcggtcctttggcctgatgtttattgctgttccagcttcccttaaaaataccaacagcctttctactgaacacttgcttactgtgtgtcaggtactgttccaagcactttaactcatttagtcctcacaacagtcctttgaagtgggaagtatcataatccccatttttcagacaaggaagttaaggccaagatatttctgtgtttctcagtaagctcctgataaggtctgaatttttttttgtttgtttgttttttgttttttgttttttgctctgttgcctgggctggagtgcagtggtgccatctcagctgactgcaaccttcgcctcctgggttcaagcgattcttctgcctcagcctcttgagtagctgggactacaggtgcgcaccaccatgcccagctaatttttgtatttttggtagaaatggggtttcctggccaggcgcagtggctcatgcctgtaatcccagcactttcggaggccgaggtgggtggatcacctgaggtcaggagttcgagaccagcctggccaacatggtgaaaccctgtctctactaaaagcacaaaaattagccaggcgtggtggtgggcgcctgtaatcccagctagtagggaggctgaggcagaattgcttgaacccgggaggcagaggttgcagtcagctgagatctcatcactgcactctagcctgggtgacagagcaagacaatgtctcaaaaaaaaaaaaaaaagaaaagaaacaaagaaatggggttttgccatgttggccaagctggtctccacctcctggcctcaagtgatctgctcgctttagcctcccaaagggctgggattacaggcatgagccgcagcacctggcccctgataaaggtccaattttgaatcttggcaattgggctctgaatccacgctcttaacccgttctgctctctgtttggtagcgtatccagtatgccaagaccgactcagatatcattgccaagatgaaaggcaccttcgtggagcgggaccgcaagcgggagaagaggaagcccaagagccaggagaccccggccaccaagaaggctgtgcaaggcgggggagccacccccgtggtgggggctgtccaggggcctgtcccggtaagccaggtcccggagaccaaccctcccactgccagaccttcctcagccacatggactggctttgggacagggtggggagagttctccccttggggcttcagacccctcctttccatttctttatagagatgtgtttctctctctcttttggggggtattgagcacctagatgatgctatctcctttcgaaactcttgttccctccttgtgactgtttctcaaggtctttcttcatggctatgacttggtttcgctctctccgtggccttgattttgtcgcctgtgtcttgtaactcattgtgcatgtagaaaatccaagtgtctactaagcaactgttaggattaataagtgaacttaaatttagaaagatcgctggatataaaggcaatatggaaaaaaattagttttatttatttattcatattatgttttgagacagggtctcactgtcacccaggttggagtgcagtggcgccatcacagctcactacaacctccgcctcccaggctcaagtgatacgcctcagcctccctagcagctggaactgtcagtccgtgccactccacccagctaacttttgcattttttgtagagacggggcttagccatatcacccaggctagtctcaaactcactgtctcagcctcccaaagtgctaggattacatgcatgagccaccatggctggcccccagttttatttttatatgccagtaacagaccagtagacttcacattgaaaagtagcactgaggggtaaatccaacaaaaggtttgcagaacgactacactgaaatcacagaatgtagctgggagaaatcagagactcagcaatggataggaagactcagtattgtcaagaggtcagttccatccaaattaattgaagattcaacgtgattgcaatcaaaatcccaccaggaatttcggtaaacactggacactgattggctctttctaaatgtgtggaaagacaaggccaagccaggcgaggagaataaagcaccaggacctgcatgaccaggggaagctccagcaaccaggccaggcccaatggctcatgcctgtaatcccagcactttgggaggccaagataggaggattgctttaggtcaggagttcaagaccagcctctataaaatagcaagacctcatctctacaaaaaataaaatagaaaactgggcgtggtgactcattcctgtagtcccagctgctcaggaggctgagctgggaggatcgcttgagaactggaggtcaaggctgcagtgaacagtggttttgtcactgcactccagcctgggtaacagagtgagaccttgtctcttttttgttttgttttgttttcttttgttttttttcgggagggagtctcagtcaatctgtctccccaggctggaatgcagtcgtgcaatctcggctcactgcaacctctgcctctcaagttcaagtgatcttctgcctcagcctcccaagtagctggatcacaggcacatgccaccacgtccatgtgcaaaaaaaaaaaaaaaacctgcagcaaccaaccaggatgatatacagttggcagaagggtaggaagacagaccaaggggacaggatgaagagtctaggtacagctacacttgtataattacttgatgtgtgatcgaggtaccactgcacttcactgaggaaaggactttttttcccctagttcatgatgcggggcagttgggtatctgcaaggggaaaaaattagccctacctcatactatatgcaaaatataacttgaagtgaattgcagatccaaatgtgacaactcacaaaatatagtttcttttctcttttcttttctttttctttttcttttttttttttttttttttttttttgagacagagcctcgctctgtagtccaggctggagtgcagtggtgtgatctcagctctctgcaacctgcgcttcctgggttcaagcgagtctcctgcccctgcctcccgaggatctgggactacaggcatgtgccaccacacccagctaatttttgtatttttagtagagatggggtttcaccatgttggccaggctggtctcgaactcctgacctcaagtgatccgccctcctcaccctcccgaagtgctgggattacaagcgtgagccactgcacccggccctcacacaataaagtttctagaagaaaacaggaaaatgtctaaatgaccttggtgagggcatgaaaagtggaaacatcctgttttccaaacaggatacaaaaagcaccgagtacaaaagaaaagatggatgaaccaggcccactccttaggtctctgagcctccgtgtctctctggctttcatgagtctcatggctctgactgggtcatgctctattcggtgccactcacactttctccaagttggtgatggtgtctggattactgtgggctcctgttaacctctctcctcttccctgcacctagttttctgtccactttggacttcagattgtgattccagcccctgagtgtgctgcctgccatctgttgtcttccctcttccccttgctgccacgcgttttgttctgcacctgccctgagtgtccctttccatcactgccctcctttgtttttgtttttgttttttgagacagagacttactctgttgcccaggctggagtgcagtggtgtgatctcggctcactccaaccttctgttgccgggttcaagtgattctcctgcctcagccactctagtagccgggattacaggtgcccaccaccacgcctggctaatatttgtatttttggtaggggcggggtttcaccatgttgcccaggctggtctcaaactcctaacctcaggcgatccgcctgcctcggcctcccaaagtgttaggattataggcgtgagccatcgtgcccggcctaccacacatttctttctgcacctgccctgactgtccctttccatctcttcctctcctttgattttgtttaagagacagggtcttgctctgcctcccaggctggagtgctgtggcacaatcagagctcactgcatgcagtcttgacctcctgtgctcaagtgatcctcctacctcagcctcacaaatagcatttaactctttctgatttaatgtcccactagaccctgggtttgttttgctctgtcgggccctctttgggtgccttttgcgcctctttctgggtgtttttccttacatctctcacccgctaggtttcctttcatggcctcttctctgcctcctggggctgctgtaaccacgcactctcctccctctctccacagggcatgccgccgatgactcaggcgccccgcattatgcaccacatgccgggccagccgccctacatgccgccccctggtatgatccccccgccaggccttgcacctggccagatcccaccaggggccatgcccccgcagcagcttatgccaggacagatgccccctgcccagcctgtgagtatctagtcccacccaccaggtctcatataaatagtgagaatacaggactagaaagggaccagttggggggctgctgtaggttgggtggtctgggcaggccccctgaggaggtggtactgaatgaggaagtagcagtgggggtgggccctgggcagaggaattggcatgctggttggagggtacggaaggttagggtaggctggagtggtgccagcacctagattgattccatgagctattgagcgcctccttacgtgccaggccccgttctgcactgtagggctgcagcagggactgagatagaaacctctgctgtcctgtggcctatagtctgtaggggcaaagaggtgggaggcagacaggcaacagacaacaatatgtggtatgttgggtggaagtaccagagtgaattcaagcagggtgagggatggaggaagtggcagtactatgggtctcccactggactcagggctcttgtgctcaccgactcccctatacccccgcagctttctgagaatccaccgaatcacatcttgttcctcaccaacctgccagaggagaccaacgagctcatgctgtccatgcttttcaatcagtaagtggggcctgtggctgggtggtccctggagggtgatggccaggaggcatctccatggaaacaggcctcagaactctgccagcagagctctgagccaagtagggctttgcagaagggacagcgaccaaagatgtgaaaggaggaggctgtggctgggcccacggcctgtgggggacatgggggtgaggctggaaaggtctccatggccagggcttgccggcttttttcagccttgtttgagggctgagggagtccaggctctgggcctcattttcccagcccctaaaatgggggcatgcaaggcaaggtatgtgtaaaactgcattgagatgtccttgaacattggctaagactggcagaagtcagcgtgctcagaaacagcaagtgtgggagatggggatgcgtgaaactcttgtgcctggcgtcagggtggaggccggtgcagccgatgtgtagaggggctgttcaccattgttgagtgaagtcgtgggtgtgggtgagttcatctggtggttctgtttcaggggctgtgagtggggcattcgtcagtgtttgtggtggggagttggagggtgtctgggagaagggatggctacatgcagcatctcaccatgctgcactgcgtggcacttagaagaacagaaagcgcaactttataatagtgccgagagaagattgtgagaacctgaaaaatacagaaaaacaataccacatgtgcagcctgtccacaaagctgtatattttgtgagaatgccgatggaaaaaaggatacctagtaaacatgaggatggctgcttaatggagaaagaagtatggaatgagaagagggaaattagagaaacagcatatcagaaaagtgagggtaaggccgggtgcggtggctcacgcctaaaatcccagtatgttgggaggctgaggcaggtggatcacttgaggtcaggagttcgaggccaatgtgggcaacttggtgaaaccccttctctcctaaaaatacaagaataaaaatggaaaaagtgagggtattggttatttttttggtgtggcgggtgggttatgatttaggaagggcccaggagactgcggtgtactgtttcttgatttaggttgcagttgcatgggtgtttgtgtttaaatttttcattaaatgctatgtttacattagagtttttcaacttagtactatctgcattttgggctggataattctgagtaatggggccctgccctgtgcattggaggctatttggcatcatttctggcctctgtccacttgatgccgttacgttagggggaaatgctgagtccctgaggtctgtcgttctctttcaggttccctggcttcaaggaggtccgtctggtacccgggcggcatgacatcgccttcgtggagtttgacaatgaggtacaggcaggggcagctcgcgatgccctgcagggctttaagatcacgcagaacaacgccatgaagatctcctttgccaagaagtagcaccttttccccccatgcctgccccttcccctgttctggggccacccctttcccccttggctcagccccctgaaggtaagtccccccttgggggccttcttggagccgtgtgtgagtgagtggtcgccacacagcattgtacccagagtctgtccccagacattgcacctggcgctgttaggccggaattaaagtggctttttgaggtttggtttttcacaatcatttgtctgtctgattttcttgctcttcatggttcctttccctccacctcagcagcacatcctgggtttttggacctcttggcattttgaggtttgcaaccttggggaaacataggatagtgtagtaatattgttcaaactcaggttacaatgactactttggcagttttgtatgttgtcccaattcacagcaggaaatggaatcctgggtcaggaaatggaaagtcagggctgccgcgtacagttaggcaggatgggtactgcacaagaatggcaccttttaagggcacaccattcactttgtaggcttacaagtttatgccaccacttttctaacagatgacaagagtgttcagggagaggtgtttcttcaccttttttttactcttctcaaaagtgcagcctgttgtagcaatggccccagagaaaccacagtaggtagttcaaacagaaaggaatttaatacaggaaacttggtgctgctgaaatcatggggcgtgtgggtggtaggagtggcggtctgggtttgagactcttgagttcgagtttgcagcccccgaatgagctcctagctagagttcagcgggatgccactctggcttccggcagtgcctggactcatttggtcactcctgggaagctactgacttgatgctggtatgaggggtgtggccgcctcacacacaggtgatctactttcctggccagtggccagccaggagcttcaggcaggtgcctgaccccaattcccctgcagtgtctagctgcagggaagtctaggatatgtgacttctggctgtacagccacaaacccagctgcagctctggattagaaagggagattgggcagggtggctcacgcctataatcccagcaccttgggaggccgaggtgggcagatgacgaggtcaggaattccaaaccagcctgaccaacatggtgaaaccccgtctctattaaaaatacaaaaaaaattagctgggcataggggtgcgtgcctgtaatcccaactactcaggaggctgagacaggagaactgcttgatcccaggacggggaggctgcagtgagccaagattgagccactccactccagcctgggccacagagcgagactcaaaaaaaaaaaaaaaaaaaaaaaaggttgagtcaggcgtggtgtctcacacctgtaatcccagcactttcggaggccgaggcgggcgcatcaccagcggccaggagttcaagacaagcctggccaacatggagaaaccccatctctactaaaaatacaaaattagccaggcgtggtggtgtgctccggtaatctcagctacttaggaggctgaggcagaagaatcatttgaacccaggaggcggaggttgcagtgagtcaagatcgtgccattgcactccagcctgggtgacagtgagactccgtctcaaaaaaaaaagggaagggagattggttggggggaccatccttaggagtttgtcacatccctgtcctggggaattttaaattgaccaaaaataatatgcacatggcccggtgctgtgactcacgcttataatcctagcactttgggaggccgaggtggacaggttgtctcagctcaggagttcaagaccagcctgggcaacatggtgaaaccccatctctattaaaaatacaataaattggccaggcgtggtggttcattcctgtaatcccagcactttgggaggccgaggtgggtggctcacctgaggtcaggagtttaagaccagcctggccaacatggtgaaaccccgtttctacaaaaatacaaaaatcaaccaggcacgggtggcgggtgccaatcccagctactcgtgaggctgaggagggagaatcgcttgaacccgggaggtggagattgcagtgagccaagatcacgccattgcactctggcctgggcaacagcaagaatctgtctcaaaaaaaaaaaattagctgggcatggtggtacacacttgtcccagctacttgggaggctgaggcataagaattgcttgaacttgggaggcagaggttgcagtgagccgagattgcaccactgcactccagcctggatgacaaaaagagtgagactccatctcaaaaaaaaaaaaaaaaaaagtgtgtgtgtgtgtgtgtgtgtgtatatatatatatatgcgcatgcgcatattacttaagaccctttctcacaccaggtacatggaaaaaggcaatcttttggcaaaaagtagatctaccactaaatacagtaggccaggtgcggtggctcacgcctgtaatcccaccactctgggagccaaggtgggcagatgacgaggtcaggagatcgagaccatcctggccaacatggtgaaaccctgtctctactaaaaatacaaaaattagttgggcgtggaggcgcgtgcctgtaaccccagctacttgggaggctgaggcacgagaatcgcttgaacatgggaggcggaggttgcagtgagccgagactgcaccactgcaatcaaccagcctggtgacagtgagactctgtctcaaaataaatacatacatacatgaatacagtaaaacatactaaatttttccttgttttttgagatggagtcttgctctgttgcccaggctggagtgcagtggcatgatctgagctcactgcaacctccgcctcccaggttcatgcgattctcctgcctcagcctcctgagtagctgggactccaggcacccgtcaccatgcctggctaatttttttttttttttaaggcggggttttgctcgtcacccaggctggagtgtagtggcgcgatttctgctcactgcaatctctgcgtcccgattctcctgcctcagcctcctgagtagctgggattacaagtgcatgccaccacacctggctaatttttgtatttttagtagagacagggtttcaccatattggccaggctggtctccaactcctgacctggtgatctgcctgccttggcctccaaaagtgctgggattacaggtgtgagccaccgcgcccgggctttttttttttcttttttgagacagagcctcactctgtcacccaggctggagtgcaatggcatgatcttggctcactgcaacctccgcctcctgggttcaagcaattctcctgtctcagcctcctgagtagctgggactacaggcacccgccaccatgcccggttaatttttgcatttttattagagacggggtttcaccaagttgaccaggctggtctcaaactcctgacctcaaatgattcacccacctcggcctcccaaagtgctggaattacaggcgtgagccactgtgcctggctaaacatactaaattcttattttcctgccaaggctctaggcccaatcctgctcatgccctgctctccctgttcacgaggaatgtcaatattaaaagcagtgaagatacagggcaccccatgcagacctcctccacttgtgatgggaaagatgggaacgacaggaattgccctctgcagtaaatgacgtttattgctgacaggcaaggggaaacatctcgcccaccatactggcaaccacaggcctactggctattaagtatgtgcgttccgtggtcagctggtcctggtttctgctttctggggacttcatagctgttagcccatgggcagttgatgtccccagtctgagttttgtttacttcctgtgtaaagagtagtccctctatattaataccatgatgatgtttgtactcattacccatcccctagcacacactctctccctttcagtcacttagcaagcactcaataagttcagcaaatatttgctgggtacctattgtgtgctgcatacttttgtagggacaaggtatgcagtgattaataaaatagagaatttccagtattgtgttgtgatgaaaacaaaactgatgtggtggggccagcatactgagaggccgaggtgggagggtcgcttgaggcaaggagaccaacctgggcaacaaagtgagacctcatctctacaaaaaaaaaaaaaaaattaaaaattagccatgagtggtggcatgctagttgggagcctgacccagggggttcactggagcccagttcaaggctgcagggagctatgatggtgccactgcactccagcctgggtgacagagtgagaccccatctccaaacaaaaaacaacctaggctgggccaggcacaggggctcacacctgtaatcccagcgctttgggaagctgaggtgggtggaacacttcagatcaagagtacgagaccatcctggccaacatgctgaaacactctctctactaaaaatacaacaacagccgggcgcagtggctcatgcctgtaatcccagcactttgggaagccgaggcgggcggatcacgaggtcaggagatcgagaccatcctgactaacccggtgaaaccccgtctctactaaaaatacaaaaaaattagccgggtgtggtggcgggcgcctgtagccccagctacttgggaggctgaggcaggagaatggcgtgagccattcgggaggtggagcttgctgtgagccgagatcgcgccactgcactccaaaatccagcctgggcgacagagcaagactctgtatcaaaaaaacaaacaaacaaaacaacaacaacaacaacaaaattagttagacgtggtggtgcatgcttgtaatcctagctacttgggaggctgaggcaggagaatcacttgaacctggaggtggaggttgcagtgagatggaggtgcagtggcactgcacactccagcctgggtgacagagcaagactccaaaaaaaaaaaaaaaatcctgatgtgaagcgggtgatggggttgggaacagtaatgagtggtccagaaaacccttctgagaaggtgcatttgagctgagctcatggtgcttggtgttgggtttgtagacatggcacagacctagtcttcatccctgacaaactcttccctggccccaagcctgtgtgtgtccatcctcttctaaaaaaagcttggacttgccagtctagaggtgagggtccctgggagcaacgtggaccctctggagaaggacgcttagcctgtggatctccgaagcacactttggaggtgagagatgaaaaaaaagaggccgggcacggtggctcacctctgtaatcccagcactttgggaggctgaggtgggcagatcacttgaggtcaggagatcgacaccagcgtggtgaatatggtgaaacccgtcgctactaaatatacaaaaattagccaggcatggtggcacgtgcctgtagtctcagctacttggaggctgaagcagaattgcttgaacccgggaggcggaggttgcagtaagccgagatcatgccactgcactccagcctgggcgacagagtgagattctgtctcaaaattttaaaaaattaaaaaaaaaaattgtgcttctcagtggccctgctcctgtggctgcaatatggaggaagagtacaaagggtgggtacaaagactggcctctgtcttgctgttgggaaatccagctgccacgttgtgagcttgtgtctggaattggttccttctggtgggttcttggcgtcgctgacttcaagaatgaagccatgcaccctcgcagtgagtgtcacagttcttaaagatggtgtgcctggagtttgttccttcagatgttcagatgtatctggaatttcttccttctggtgggtttgtagtctatgctgagttcaggagtgaagccacagaccttcgcggtgagtgttacagctcataaagataatgtggacctatagaatgtgcaacagcaaaatttattgcaaagagcaaaagaacaaggcttccacagcatggaaggcgccctgagccagttgcagctgctggctagggtggcctgcttttatttccttatttggtcccacccacatcctgctgattgatccattttacagatagctgattggtccattttacagagtgctgattggtctgttttacagagtctgattggtccgtttttacagagagctgattggtgcgtttacaaatctttacctagacacagagcgctgattggcgtgcttacaatcctttagctagacacagagcgctgattggtgcatttacaatcctttagctagacagaaaagttctccaagtcccctacctgattagctagacacagagcactgattggtgtgtttacaaacctttagctagacacagagtgctgattggtgcatttacaatcctttaggtagacagaaaagttctccaagtcctcaccggcccagaggcccagccatcttcacctctcaagctgtctgtagaggtccacgtgtcaagaaaactgaggacagaggccctcagtccagttcccacaagcaactgcatctccccaacagctgcctgaatgagtttggaagcagtcctcccaccattcagccttcagatgaaactgcacccctggctgacaggctgattgcagccttatagcagaccttaagcctgagacattcgacccacagaaaaggtgataattttggtctttttttttctaaacaggttcttgctctagagtgcagtggcacgatcatggctcactgcggcctctacatcctgggttcaagtggtcctcccacctcaacctcctgagtggctgggactacaggtttgtaccaccatgcacagctagtttttctctttttttcttctttttgtaggtacaagggtctccctgtgttacttaggctggtctcaaattcttaggctctagcaatcctcctgtctcagcctcccaaagtgttgggattacaggcatgagccactgcactggggcaatgttggtcttaggctaattatgcagcaggagatacatgcactgtgctttgggaattgaagtcacttctatttctttgtggcttcatcagtaatatggggcagggggcacggttcccacagctgattcttgagtgttctttctgagtatccttaatacttcacacactatcatatatctgaactttgttcattgattatctcccctttaattttcattccttgatgaatctccagggtctggattaagtcctaggatactttatgtactcatgaaatcttcaatgaatgaagaaatgattttttttttttttgagacagagtctcactctgtcacccaggctggagtgcagtggcatgatcttggctcattgcaacctccacctcccaggttcaagcaattcttctgcctcagcctcctgagtagctgggactacaggcatgcgccaccatgcctggctcatttttgtatttttcagtagtgacagggtttcaccatattggccaggctggtcttgaactcctgacctcaggtgatccacccacctcagcctcccaaagtgctgggattacaggtgtgagccactgcatccggcggatttttttttttttttttttgagacagggtctcactctctcgttcaggctggagtgcagtggcgtgatcttggctcactgcagcctccacctcccagtttcaagtgattctggttcggcctcccaagtagctgggactacaggtgtgtgccaccatgcctgtctaatttttgtattttcaccacgttggccaggctggtctcaaaactcctgacctcaagtgatccgcctgcctcagcctcccaaagtgctgggattacaagagtgagccaccatgtctggcctgaatgaagaaataattttttaaagagtgttttaaagtggggccgggtgcggtggctcacacctgtaatccccacacttttggaggccaaggtgggtgggtcacttgaggtcaggagtttgacaccagcctgaccaacatggtgaaaccccatctctactaaaaatacaaaattagctgggcatggtggcagatgcctgtaatccccgctacttgggaggctgaggcaggagaatcacttgaacccgggagggggaggtcacagtgagctaagatcgtgccattgcactccagcttgggtgacaagagcgaaacaatgtctcaaaaaaaaaaaaaaaaaaaaagaaattgcatttcaaagccaggtgcagtggctcacacttatagtcacagctacttaggaggctgcggtgggagaatagcttgagcccagttgttcaaggctgagtgagctgtgattgtggcactgcactctagtctgggtgacagagtgagaccctgcctgtaaaaaaaaaaaaatctttcaggccagacgcggtgactcactcctataatcccagcactttggaacgccgaggcgggtggatcacctgaggtggggagttcgagaccagcctggccaacatggacaaaccctgtctctactaaaaatacaaaaatagccgggcatggtggcacatgcctgtaatcccagctactcgggaggctgaggcaggagaattgcttgaactcgggaggtggaggttgcagtgagctgagattgtaccactgcaatatgagactccatctcaaagaaaaaaaagaaaaaaaaaaaaagatagcatagcaatggctgtgggcctggatacaagtcttagcctctccacttctccacttcctggctctgtaagccttagacaagttccttaactccacacttccatttccatgtaacaaggggttataggccaggcattggtggctcatgcctgtaatcccagtgctttgggaggccaaggcgggaggatacttggggacaagagttcaagaccagcccaggcagcacagtaagacattggctctagaaaaataaaaataaaagaaatcatccaagaatggtgacttgcctactattctactcgagaggctgagaggggaggatttcttgagcccaggagtttgaggatgcagtgagctatgatcacatcactgtacttcagcctgagcaacagcaagatcctgtctcaaaaaattaaattaggctgggcttggtggctcatgcctgtaatcccagcactttggaaggccatggtgggcagattgcttgagcccaggagtttgagacgaggctgggcaacatgacgaaaccccggctctaccaaaaaatacaaaaaattaactgggcataatggtacatgtctgtggtcccagctactcggtaggctgaggtgggaggaatgcttgagcccaggaaataggggctacagtgaaccaggatcatgccagtgcactccaacctgggcaacagagcaagactctacctcaaaataattatttaaaaaaatggattaattgggcataggtggcttgtgcctgtagtcccagttactcaggaggctgaggtgggaggattgcctgagtctaggaggttgaggctgcagtgagccgggatggcaccattgcactccacctgggcaacagggtgagaccctgtctcaaaaaagaaaaaaaagggaggggttataatcactcctcctgacatgatacagagtatccatttgagttcataacataaatatgtacttggtgaatgctctgtaactattggcttttttattgttcccattttacatataaggaagctgaggctttgtgaggagaaatagcttagcccaggtcatccagtgggaagcgtctggtgcagaggaatagtgatcatggtgggactttgcctagcctaaggttcagcatacaatattcagtcagtactcaagggctgggctgtttctggtaatcaaagggctgccttgttctcctgccccacagcacaggaaattccaaggtggttttctttacaggctcctccgcttctgtggccagaggggacagcggaggagcccaggtacctaagccaactcaagagaagatggaattgaatatttcaaccaccttatctaggcctctgtgattgttgaggagggggctgtcactgggaaagttgtgagctgctttggaccttatctgggaatttccttgggcttacagcctttaccctatccttgaaatggttctggtttcatagcaacttctaggtggtgtgggcgaagtttgggactggtttagggcggggacaagaccaagaacacaagtttccttgtactacgggagagagggaggggaggaaattggagaccccagcacccccttgctcactctcttgctcacagtccacgatggcccggtccctggtgtgccttggtgtcatcatcttgctgtctgccttctccggacctggtgtcaggggtggtcctatgcccaagctggctgaccggaagctgtgtgcggaccaggagtgcagccgtaagaatggggaggggagaattgggggcttgggcgttagcctgtgtggagggtgctgcattcccttctattccttccctagaccctatctccatggctgtggcccttcaggactacatggcccccgactgccgattcctgaccattcaccggggccaagtggtgtatgtcttctccaagctgaagggccgtgggcggctcttctggggaggcagcgtgagtcttgggagagtgaaagagggaagggtacagagctggggtagactcattatccccatgaagggaagatttgaggggggtgaactgaaatagacattgtggggggatattgttacttactttattttatttgcttattattttttaattttttccgagacagagtcttgctctgtcacccaggctggagtgcaatggcacgatctcggctcactgtaacctccacctcttgggtttaagcgattctcctgcctcagcctcccaagtacctgggattacaggcatgcaccaccacacctggctaatttttgtatttttagtagagacagggttttaccatattggccaggctggtcttgaactcctgacctcatgatctgcccgccttggcctcccggagtgctgggattacaggtgtgagccactgccccccagcctattttcactttatttaccaattttaggacctgatatggtcccacgttctgttctagacaccaagatacaacaacaaatgatcctttttattctaatggagggaaatgaacaaaaagcaaggcataaaaaatagcagcagccgggcacagtagctcacacctgtaatcccaagtaaggccaagttgggaggatagcttgagcccaggagttcgagaccagcctgggcaacatagcaagacccccatctctataaaaaaaaatttaaaattaactgggcttcatggcatgtgtctgtggtcccggctactcgggaggctgaggtgggaggattgcttgatcccagaagttgaggctgcagtgagccgtgatcatgctactgcacctcaacctgggcgacacaatgagaccctgtttccaaaataataataataataaaagcaaatatgcgctgctgtgagaattaacagagacttacttgggtgttcagaaagggcctctgaacaggtggcatttaagctgagattcatatgacaaggatggagcagttatgtggagatcagggagaagggagaatgcaaaggccttcagcaggcacaagcttgccatcttcccagaccctagcttttaactcctcttccccaggttcagggagattactatggagatctggctgctcgcctgggctatttccccagtagcattgtccgagaggaccagaccctgaaacctggcaaagtcgatgtgaagacagacgtgagtgtcatgggggctggcaagaaatgtggggggaggacccttaggttgtggggatgggcaaaaatgctcccacacttggctccctggcagcctaggtatgtgcgctgggagaaattctttccctgcctcaattttctcaccagtaaaatgggtccagttgggaggtgcaaagattagagggctctaggctaatttgcatagcacttgtgtggccagacctgggccctgcagctgcagcctttgctaaaaccactagatcctttgtggtgtgaccgctggttttctttccactgtttcccctttctctttttcagaaatgggatttctactgccagtgagctcagcctaccgctggccctgccgtttcccctccttggctttatgcaaatacaatcagcccagtgcaaacggctcgtctccgtggtctttggggtggggtagggtagggtggggactgtacaaatgaaatgtttctctaggttgctgaatctaaccaattaacccgctgcctgtggtaacgtcagtggttgctaggcagagtttcactgatgaaagccctgtgcagtaggagcgctcctaagcttaggtttcggacacaagcaaaggaaaacctaagcagcccaactaggggattgtagtgtcctctctagaccagtgggagggagccaatcggactacgcggaggatataaatcgcacagtaaaggttttcttggaagattatctggaaagggaggtgggaagtaacctgcgcctatctgcccagttttcctccttttcgcctttgagaacagtaatcgctcccgccagctcaagatcagctcctcttccagcctctttctgtcaatcctgcccgtgcccccttctttgcatttgtatcccctcccccaagtccgctccgatccaatccggagactcgactctgccccccgtactccagactaaatccgttcctcggctcagctaagcagctctgcacgtcccttcccacttgctcagccaatcgctgggctcggccccgcccctttgggcttggtccttctcacgccaccaatccgcgcctcttgtcccgccccctgcccgcgagtccgccaatcccgcccttcggaaagcgtcgcctggtatccagctgccggagcgggtcgcgccggaggggggcggaggcggaagtggcggtgccgggcccggggagtaggaaggagccggggctgtagccggagtggagcggctgccagccgaggagcaggcgcggccgcggcgccatattgcggccctcagcggccgcgaccgagtcatggctgagacctacggtgagggtggtggacgaagctggggtcctgggtctgggcccagggaggatgcggcctgtgggaatgggcggggctttgtagatcagggggcggggtctggtgtgatggaggcaggacctaagtggatgctgggaggggtttagtgggtctgaggctgagcttaatcgatttaggtggagcctgagggtctggtgcgtgggttaaatagatctggggcgggatttgagggagctggtcctgaggggttcagggaggccctgagggaagaggtgggccttaatggatctgggcggagcctgagtgaaggggcggggctgactgcatgaatggcaggagtcgggcttatgggctagagggaacactgaatggaagctcgggaccctggggctgatctggctggagagagctctggaatgggtttggggatgggctgtccttgagttaggggcaggacttagtggcaaagggtgggacttatgcatgagaatggagccgggttctgggcagagggagggaaggagaggtcgggaagtggaaaatcagtagggatgcaccataggaggtggtgattggaggcaggggaagtgcaggtttaggagtcagagggagccgcattcactcaacaaatatagaagagaagggagaagagtgcaaagaccctgaggtgagaaccagcttgtcattttcagggaatagactgaaggtcaggagctatagtggagtgaatgagtcagagggtggtaggaggtgaagaggaacaagggctatatcgtagtccttgtttaaatagctttcaagagactttagcgacaaaatagctaagatctgggactctggagcccttggcctaggtttgaatctcacttctgcccagctgtgtcactttgggcaagtcagttaacctttctggcctgttacctcatccggaaaatgggaataatttttagtctacctccctcatagagttttcctgaggatgatgtgagctgttgatgtgagtaaagacctttagaactgttcctggcccacaacaacacacaattgacccatgtaacaaacctgcacatgtgggctgggcgcggtggctcatgcctgtaatcccagcactttgggaggctgaggcaggcggatcacctgaggtcgggagtttgagaccagcctgaccaacatggagaaaccccgtctctactaaaaatacagaattagctgagtgtggtggcgcatgcctgtaatcccagctactcgggaggctgaggcaggagaattgcttgaacctgggaggtggaggttgcggtgagccgagatcgcgccattgcactccagcctgggcaacgaaaagtgaaactctgtctcaaaaaaacaaaaacaacgacaaaaaaacccctgcacatgtactccctgaatctaaaataaaagttgaaaaaaaatatatagaatgtgcctggcacatggcaagtactacataagagttatctgttactgttacctattggtttgtttctgcctatgtctgtttctctccctctaactgtgatggttagagagagagattggattggaatccatcttttttccctgtatctttctctccctgtgggtatccctgattttggctccatctggtcagacttcctcttcaaattcctggtgattggcagtgcaggaactggcaaatcatgtctccttcatcagttcattgagaataagtgtgagtttcccgcagtggtcctgggaaccctgagctgtgtttatgcgcatggtgtgggctggtgggcagccggtggggagggcagggctggccataggtacaagtccagtgctggctttttggtccttgctttgtcgtatgtcctttactaggttctccttgacctcaagtcactccagcaaggagaatgggtttgtagagactgagagggccttggaggatgggggatcctctgagctgtctcctctctccctgtactgccccttctgttcctcctactcccagtcaaacaggactccaaccacacaatcggcgtggagtttggatcccgggtggtcaacgtgggtgggaagactgtgaagctacagatttgggacacggctggccaggagcggtttcggtaggtgggctgggctcccaagggtgatggggagagagagtgagaaggaaagagagagatgtgtgtgtagagtcacttggagacactgagagggcagacaaggcagacagagagagatgagacaccgtagttagcaggtatatatatccaaggagagagggagtactggagagataaagagatggtggaagaaaaagaggtaggggccaggcgcaatggctcatgccggtaatccccgtgctttgggaggccatggtgggaagattgcctgagcccaggagtttgagaccagcctgggcaacatagtgagaccccatctcaaagaaagaaaaagagatagagaaaagtggcttgggggtggggaaagggatggagactgagagacaccgaaacagaaagagaaggggaaacttgagagactcacactcagaaaggaaaagagcaagagagacagagactaagagagttgaagagaatgataagggaggtaaggaggcctggcacggtggcttacacctataatcccagcactgtgggaggctgaggcaggtggatcacttgaagtcaggagttcaagaccagcctgccaatatggtgaaaccgtgtctctactaaaaaaaaaaaaaaaaaaaaaaaatcaaaaaatgtagccaggctgtggtggtggatgctagctacttgggaggctgaggcaggagaattgcttgaacctgggaggcagaagttgtagtgagtcaagatcgcaccactgcaccccagccggggtgacagagcgagactctgtctctgaataaataaataaataaataaatgaataaataaataaataaataaataaataaataagggaggtgaggagacacagagaaacagaggtcagaggcagagagggagacagggtgagtcagacaggtgtagttggacgttgaatgaatgaatgcacgaatttacgggaaggcaagggtgagcatgagagccacagagatggaacagaaagagagacagtgagaaatagggaactgaagacacacacgccaaggcaggagaaccgcttgagtccaggagtttgagaccagcctgggcaacattgtgaaatcccatctttccaaaagagagatggagaaatggacgtgttgtgggagagagagagagagaaatgcgtagggctcaacacactgtaggtcttcaggaaatgcctgcagagcagaaaagttgatagacacatagaaaccttaggagaggccgggcgtggtggctcatgcctgtaattccagcattttgggaggccgaggcgggcggatcacgaggtcaggagatcgagaccatcctggctaacatggtgaaaccccgtctctactaaaaatacaaaaaattagctgggtgtggtggcagacgctggaagtcccagctacttgggaggctgaggcaggagaatggcatgaacccagaaggcggagcttgcagtgagcccagatcgcgccactgcactccagcctgggcgacagagctaggctccgtttcaaaaaaaaaaaaaaaaaaaccttaggagagtcggagaaacagagagcagggagagaaatagagggaattcagtccacggaaaagtgtgatctatggcagcatctagtagctgctgagttaattcttgcgtatggattaactgcctgaggtgcacagagcccaaaggcagagagaggggctgaaggatagacaggtgtgtagcatgggctaggtttacggtgagtgcttagtaaatgctgtggaatgattgcatgagttccagaaggacccagactggtgagacagagaatgcagaattggctacactgggaaggagactccacctgacacagcaggagaaggataagcagatgttgtatagtgcttgggcagggccaggcaaaggggagatttgctcagaaaatgttgaatgaatgaatgcacaaatgcatgggaaggcaaaggtaagcatgagagagccacagagatgaaacaaacaaacaaaaaagacagaaatagggaattaaatagggccaggcacggtggctcacgcctgtaatcccagcactttgggaggcctaggcgggcagatcacttgaggtcaggagttcaataccacactggccaacatggcgaaaccccatctctactaaaaatacaaaaattagccgggcgtggtggtgcatgcctgtaatcccagctacttgggaggctgaggcaggagaatcacttgcatccggggggcaaaggttgcagtgagccaagatcacgccactgcacttcagcctgggcgacagagcaaaactccatctcaatcagtcaatcaatcaatcaatcaatcaataaaagacatgtagggccgggcacagtggctcacgcctgtaatcccaacactttgggaggccaaggtgggcggatcacttgagctcaggggttcgagatcagactggccaacatggccaaccccatctctactaaaaatacaaaaattagcctgatgtggtggcgtgcatctgtaatcctggctactcgagaggctgaggtgggagaatcacttgaacccgggaggtggaggttgcagtggttgcagtgagccgagatcatgccactgcaccccagcctgggagacaagagtgagattcctactcaaaaaaaaaaaaaaaaaaaaaaaaagaaaaaggaaaaagacacataggttaaggcaggagaatcacttgagcccaggagttggagaccagcctcggcaacctagcaaagccccatctttacaaaaaatattaagaaattagccaggtgtggtggtgcacacttgtagtcccagacactacataggctgaggtgggaggatctctccgttgggatactgagcctaggaggtcgaggatgcagtgagccaagatcgtaccactgcactccagcctgggctacagagcaagaccatcaaaaaaataaaaaataagacacacatgaaagagacacagagagaaaaacagacgaatggaaagatagggacacagggagagacaaaaatggagattcataaatagagacagctggccagctaagtgagatagaagctgagagaggcgaagagagagggacttcaaggatgcaagaagagagaggaattgcatggtgacccgaccaaggccaggttttgggggatgggccagcagtgaaggggggggcctccgaaccaccagtctgtctctgtagaggggggcattctcggggcagaccccagccttgggggtgactgggtccccctggccccacaggtcagtgacgcggagttattaccgaggggcggctggagccctgctggtgtacgacatcaccaggtgggtgcccggggtgggtggggtagggcatgggtggttcctctcctgcactgcctccctcccttctcccttctccacagccgggagacatacaactcactggctgcctggctgacggatgcccgcaccctggccagccccaacatcgtggtcatcctctgtggcaacaagaaggacctggaccctgagcgggaggtcactttcctggaggcctcccgctttgcccaggagaatggtgagggctgtgtcgtggaccaggtggtggtgggggtggacagtccacagggaccatgggtttactggctctcagtggctgtacccagcaggggaacgtggaggttcagaagtctgggttcaaatttgagtgttggctgggtgtagtggctcacacctgtaatcccagcagtttgggaggccaaggtgggaggactgcttgagcccaggagtttgagaccagcctggacaacacagtgagatcctatctctataaaaaatttaaaaaattagctgggtgtggtggctcatggctgtagtcccagctacagtggaggctgaggcaggaggatcacctgagcctgagagtttaagactgcagtgagctgtgatcacgccattgtactccagtctgggagacagagcaagacactgtctccaaaaacaacaacaacaacaaaacaacaacaaaactaagtgttgccatcagtgagctatgtgattacactggttctcagtttcttcatctggaaagtgggatcacagtgtttctgccccacagtgtgctgtgatgattaagggagattgtggaaagtccttagcacccgccacagagtgggtgctagattaatgttggccgctaaggtttcgcctaccgtcaggaggccgcacagggtattggttttttaaattaattattttatttattttttcctcctaccgcaccttcctgggtattggtttaatgtagagattgcaaccctagatggccctaggtgaaaggcacttttttttttttttttctgagacggagtcttgttctgttgcccaggctggagtatagtggcgcaatctcggctcactgcaacttctgcctcagcctcccgagtagctgggactacaggtgtgcgccacaacgcctggctaatttttatatttttagtagagacggggtttcaccatattggccaggctgatctcgaactcctgaccttgtgatccgactgcctcggcctcccaaagtactgggattacaggcgtgagacactgcgcccggtgaaaggcacatttttgaatacaggagatgggatggggtagatccttgagtaacaggtactggtgttaaggggagtgcagcatactgacaacccacaccaaaaggtttgcaagggccaaccacaatggctcacacctgtaatcccagcattttgggaggccaaggtaggagcatcacttgagatcaggagttttagaccagcctgtgtaacagagtgagaccctgcctctacaaaaaaaaaaaaaaaaaaaaagcctgggtgtggtggtatgtgcctgtggtctggggtactcaggaggttgaggcaggaggatcacttgtgcccagaagttcgaggctgcagtgatctgcaatcacaccactgcactccagcctgggggacagagagagactttgtctcaaagaaaaaaacaaaaaaggtttgcaagtataaactcatttgaaaacattgtgttggccaaaccacccacatctggtggcttgagatctgcctgtgttcccctgttttgcaacctccaggtttaaaggaggttttgccatcagagaggtgtgggtgtgaattcagctctgattttctgactgtggggccttgtcatgctgctgatgggtagactctggttggcctgttcctgtcctagatggtgctagagacacagtgttggagacagccctaggcccaaccttcatggagctcacagttcagtgggtgagggtggaaggacagacccacttccagacagtgacacctcaggaaggtcagggcttgatggtgaagcaccgggagacaggggtcagagccagcaggggagagccccagagggtcagggccagtactgggggggcaggcagagggatcggggtgggatggagaacacaggcagaggggtcagggctgggatagggcaggcagaggcagaggggtcagttgggatgaggggacacaggcagaggagttacatgggatggggggcaagggcagaggggttggggtgggatggggggcccaggtagaggggtcaaggccaagtttgggaggcacaggcagagcggttgcatgggatgggggagcatgggcagagggctcaggggtggaatggggcaggcctaggcagaagggtcaggggtggaatggggcaggtccaggcagaagggtcaggaaaggaatggggcaggcccaggcagaagggtcaggggtgggatggggacccaggcagagggttggggccaggatgaggaagcacaagcagtggggtcagggccaggatagggggccacaagaagctgtgggagccctaagtcggtacctgactcagcccaggaagtcagggaggacttcttggaggaggagctgtgtgagctgagctctgaaggaagagctgggtgggcatatcgggaagcggacattagtggcagggaaatggcatgcgcagaggcctgaggtgagggtaaggggggatggaacattggaggaacaggatgagagtcagcaggtgagagctcagtggagggtggggactaactggggccctgacctcagagtgtgtgcccctgcagagctgatgttcctggagaccagcgctctcacaggcgagaacgtggaggaggcgttcctcaagtgtgcccgcactatcctcaacaagattgactcaggtgaggccccgaccggcccgagtgggagcgaagggcaggcccgggggtctccaggcaaccaatgctgacctctccccttccccacaggcgagctagacccggagaggatgggctctggcattcagtacggggatgcgtccctccgccagcttcggcagcctcggagtgcccaggccgtggcccctcagccgtgtggctgctgagctctgtggagccaggtgggacactgggggctttagggaggcagggcggcctcttgggcatgggggagatggtgtggagatagacactgaacatgtgatgacaagagaaacagagtgagagaaagatgcaaaaacacacaagctaaaggaggcatctggctgggcgcagtggctcacgcctgtaatcttagcactttgggagtccgaggcgggcggaggcagttcattgggtgggggtggggagacagacccacttccagacagtgacagctcagaaaggtcagggccaggcctggctcggtggcttatgcctgtaatccctgtactttggaaggccgaggcgggcggatgacctgaggtcaggagttcgagaccagcctggccaacatggtgaagccccctctctactaaacatacaaaaattagctgggcgtggtggcaggtgcctgtaatcccagctactcgggaagttgaggcaggagaatcacttgaacctgggaggtggaggttgcagtgagctgagatcacaccattgcactccagcctgggtgacaagagcaagactttgtctcaaaaaaaaaaaagaaagaaaggtcaggaccagatggggaggcactgggggagaggggtcagagccagcaggggagaggcccaggggggtcagggccagggtcagggcacaggcagagggatcagggtgggatagggcaggcagaggcagaggggtcaggtgggatgaggggacacaggcagaggggttgcatttgatggggggtatacataaggtcaggagttctagaccagcctggccaacgtggtgaaacccctcctctactaaaaatacaaaaattagccaggcatggtggtacatgcctatagtcccagctacttgggagactgaggcaggagaatcacttgaacccaggaagctgagggtgcagtgagccaagattcagccactgcattccagcctgggcgacagagcaagactctgtctcaaaaaaaaaaaaaaaaaaaaaaaaaagagacatctgccaggccacagggaatccacctgcagccccaggccagcttcctgccctagaccttgaccctcccattcatagttctccagcgatttattgagcgcctgctgtgtgccaggccctgctcaaggcactggggatatggcagggagtacaacagactcccatcctcatggtgctgacattctctttgggggagacaggtgataaacaagagatgtaagtcgactgggcgcagtggctcacacctgtaatcccagcactttggcagggtgagatgggaagatcactttgagaccaggctgggcaacaaagcaaccttatctccacaaaaagttttttaaaattagcgaggcgtggtggtgtgcacctggagtcccagctacttgggaggctgaggtgggaggatggcttgagtccaggtgttcgaggctgcagtgagctgtgaccatgcgccactgcattccagcctgggtgacagagcgagactcttaaaaaaaaaaaaaaaaaaaaaagtaaagtatgtagtagtgagggaggtaagaactatggggaaaaataaaacaggcacagatgagtggatagggtggaggagtgtacttttttttttttctttgagatggggtattgctctgttacccaggatggagtgctgtggcgtgatctcggctcactgaaacctccgcctcctgggttcaagtgattctcctgcctcagcctcccgagtagctgagattacaggcgactaccaccatgcctggctaattttttttaatttttatagagacagggtttctttttttttttttttttttttttgagatggagtcttgctctgttgcccaggctagagtgcagtggcacgatcttggttcactgcaacttctgcctcctgagttcaagttgcctcagcctcctgagtagctggaactacaggcgcccgccaccacgcctggctaatttttatgtatttagtagagatggggttttaccatattggccaggctggtctcgatctcttgaccttgtgatctgcccgcctcggcctctcaaagtgccgggattacagtgtgagccaccgcacctggccgacacagggtttcatcatgttggccaggctggtatcaaactcctgacctcaagtgatccacccactcttggcctactaaaatgttgagattacaggcgtgagccactgcgcccggccaagaatgtacttttttttttttctgagatggagtttcactcttgttgcccaggctggagtgcaatggcgcgatctcagctcaccgcaacctctgcctcctaggttcaagcaattctcctgcctcagtctcctgagtagctgggattacaggcatgtgccaccacacccagctaattttgtatttttagtagagacggggtttctccgtgttggtcaggctggtctggaactcccgacctcaggtgatctgcccgcctcagcctcccaaagtgctgggattacaggcgggagccaccacgcccagcctttttttttttttttttttttgagacagagtctcactctgtcgccatgctagagtgcagtggcacgatctcggctcactgcaacctctgcctcctgggttcaagcaattctcctgcctcagtctcccgagtagctgggactataggtgcgtgccaccatgcccagctaatttttgtatttttagtagagacatttcaccatgttggccaggttggtctcgatctcttgacctcgtgatccgcccacctcagcctcccaaagtgctgggattacaggcgtcagccaccgcacctggccaagagtgtacatttaaacaagatgaggagggaagcctcgctgagaagatgacatttgagtgaaggaagggagatagggaggcctgtggggatctggggcaagagcactgctggagagcacagcaacgcttctagcgaggggtatgcctggtgtcggtgagggtgaccaaagcagccagtgtggtcatcatggaggacctgtgtgtgttttgtgggtacagcatgagatggggtcaggggttggaggaagcagatcagttagggcctgtgggccctggggaggcctctggcttataccctgtgtgggagccatgggaggcttctgaacagaggaaggacaggatcagattcaggggtgcagagagttcctctggctgcataaagggaaggggctgtgagggacagaggaggtcaccaggacaccagagaggaagctgctgcaaagtccagggaagatggtggaggacaggacaagggggcgggaagaggagtggctgagaagggaatagggttcatgtcctccctagactctctgtcttccagtcttggcctctctcttttttttttttttggttcctgtctttttattttgagacagagtctcgctctgtcacccaggctggagtgcagtggcgcgatcttggcttactgcaagctccgcctcctgggttcatgccattctcctgcctcagcctcctgagtagctgggactacaggcacccgtcaccatgcccggctaattttttgtattttttttagtagagatggggtttcacggtgttagccaggatggtctcgatctcctgacctcgtgatcctcctgcctcggcctcccaaagtgctgggattacaggcatgagcctttcctttttttttttttttttttttaattttagagagaatctcactctgctcactctgtcacccaggctagagtgcagtggcgccatcttggctcactgcgacctccgcctcccgggttcaagtgagtctcctgcctcagcctcccaagtagctgggattacaggcatgtactgccacaaccagctaatttttgtattttttttttttttttggagatggagtctcgctttgttgcccaggctggagtgcagtggtgcagtctcggctcactgcaacctccgcctcctgggttcaggtgattcttctgcctcagcctcccgagtagctgggactacaggtgcgtgccaccacgtctggctaattttctgtatttttagtagagatggggtttcaccatgttagccaggatggtctcgatctcctgacctcgtgatccacctgcctcggcctcccaaagtgctgggatgacaggcgtgagacattgcgcccggccaatttttgtatttttaatacagacagggttttgccatgctcgtgaggctggtcttgaactcctgacttcaggtgattcacccgccttggcctcccaaagtgctgggattacaggcctgagccactgtgccctgccaatcctgtctccttttgatgcagccactgggtctttctaacacacatatctgctcctgtcgctccctttttcaaaaccatccatgcatctcagggccccaggacacaaatgaactcctcagcctggtgtttgaccctctgcagggactggcccctgccagcccagccttaccggcctcagccacttgtcggtctccctacctctcaggccactccagccacactgaagttcttcccattcctctgggcccttgctcatgctgggcctctgcttggaacattcctaccctcttttccctggcaacctccttcctccaggcagcactacttgttcctccaggcttggtccaaacttttgtttttttttgagatagagtctctgtcactcaggctggagtgcagtggcgtgatttcggctcaccgcaacctccgcttccaggttcaagcaattctggtgccccagcctcctgagtagctgggactatgggcatgggccaccaacgcctggcaaagtttttatatttttagtagagacagggtttcaccacgttggccagctgctcacaaactcctggcctcaagtgatccacccacctcagcatccaaagtgctggaattataggcatgagccactgcacccggccccaaacttcttgacaggctttcaaaaccctgcaggatttggtcccatccctccttctctgggggatgtgtatgtcttgccagttctcccttctatacttcatgctaaatcccctcccagcccttggcagctccagggtgggacaggtggggaacaagtggttagaccttggatctacttggaaggcagagccaacgtgatttcctgatggaatggatgtgtaatctgaaagagagagaggaatcaaggatgatgtcttcagacagtgctctcttgtctttccaggactttgcacctgctgtgcctgagcctaagtttgctcatctgtaaaatgaggctaataatagcacctgcttctatagatgttgagaagaagaaatacattaattcacgaaagtgctcagaatggggcctgatggtcaagacttgatcgatgagggctgtttttaaagttttcttcttatccatctttgggctgagctcaaatgaatgggtgtgtcttcttcacctcagggcttagcagagactctgtcctagagagtttgccctcagtaggtgaaatgtaacaaggcaaggcaaggctttttcacactttgctgactgcaatctacaggaggaaatatattttatgtgttaatcaaggactgactgtagcagatcccacccacatataaaactcaaacacacattttcctaccaccagtattctttcgtttcttggcactaaaatgaaagtcacataacatacatttacgtgacttttcaaagtgtacaattcagtggcattcagtacattcacagggttgtgcaatcaccacttctgtgttgttccagaatgttttctttttttttcttttcttttttttggagacagagtctcgctctgttacccaggctggagtgcagtggtgcgatcttggctcattgcaagctccacttccagggttcaagcaattctcctgcctcaacctctggagtagctggaattacaggcatgcaccaccacacccggctaattttcgtatttttagtggaaacggcatttgaccgtggccaggctggcttgaactcctgacctcaggtgatccacccgcctcggtctcccaaagtgctgggattacaggtgtgagccactgcgcccggcctcagaacgttttcattactctcagaggtgccatgcttatactgctttgtaccttatacctttgtacccatatttattaagcagtcactctccatttcccccaacccctagcaaccaccaatttgttttctgtctcttttggccaatatgatattcttttccttttccttttttttttgagaagggtctcactttgtcacccaggctggagtgcagtggcaccatctcagctcactgcagccttgacctcctgggctcaagtgtttctcccacctcagccccccaagtaactgggactactggtgtgcaccaccacgcccagctaatttttatatttgtattttttgaagagatggggtttcaccatgttgctcaggctggtctcgaactcctgagctcaagtgatccacccacctcagcctcccaaagtgctggaattacaggtgggagccaccatgcctggcctcttttccttttttcttttcttttcttttttgtttttttttttttttttttttttagatatggtctcactgtgttagcggggttggtcttaagctcctggccttgccgggcgcagtggctcacgcctgtaatcccaccactttgggaggctgaggcgggcagatcacgaggtcaggagttcgagaccagggtgaccaacatggtaaaaccccacctctactaaaaatacaaaagttagccaggcgtggtggtgtgctcctgtaatcccagctactcagggggctgaggcagaggaatagcttgatccctggaatcagaggttttagtgagccgagatcgcaccactgcactccagcctgggcgacagagctagactccgtctcacaaaaacaaaaacaaacaaaccaaaaaaaccaaaacaaaacaaaaaaactcctggcctcaagcaatcctccacctcagcctcccaaagtgctaagattacaggcatgagccaccgagcccagccaaccaatataatatatctttttaaattattattattattttttgagatggagtttcgcttatgttgcccaagctggagtgcaatggtgtggtctcggctcactgaaatctccgcctctcaagttcaagcgattctcttgcctcagcctccctagtagctgggattacaggcgcccgccaccacgcccagctaatttctttgtatttttagtagagacagggtttcaacatgttggccaggctggtctcaaactcctgacctcaggtgatccgtctgtcagcctcccaaagtgttgggattataggcatgagccactgcgcccggcctatttacaaaatttttttttttaaataatgttttaattttgtagagatggtgtctatgttgcccaggctggtcttgaactcctgggcccaagtgatcctctcttgcccttgcctcccaaagtgctaggattataggtgtgagccactgtgcctgcccaaccaatagaatattcttattatatatgatgcactctggtatttgccgttctgtgctattctgtttgaatttaaaaattggtcaagacccaccaaactgatttccccaccaaggcagtgacacacattagaatgacctggagaattttaaaagatactgatgcccaggcctcaccctagagattctgaagtggtttcaggactttttcttaattaaaagataaatagagatgaggtctcactatgttgcccaggctggtctcaaactcctggcctcaaacgatttctcccaccttggcctcccaaagtgctgggattaaagacgtgtgccaggctgggcatggtggctcacgcctgtgatcccagcactttggggggctgaggcaggcggatcacaaggtcaggagatgaagaccatcctggcttgatctgtagatcaagtgaaaccccgtctctactaaaaatacaaaaaaaaaaaaaaaaaaaaaattagccaggcgtggtggcaagtgcctgtagttccagctactcaggaggctgaggcaggagaatggcgtgaacgcaggaggcggagcttgcagtgagcctagatcgcgccactgcacttcagcccaggcaatagagcgaggctccatctccaaaaaaaaaaaaaaaaaaaaaagatgtgagccagccagttgcaggatttctggaagctcccaggtaatgctatatacaaccaaagtgagaaccactaacctaacgttgtctccccagcttggggaacagtgaaatgagacttagagccagggtgatccaggaacatagagggacacagaaagatacaaaggcaggttcattttatttatttatttatttatttatttatttatttatttaaattttttgagatggagtgtccctctgttgcccgggctggagtgcagtggtgtgatcttggctcactgcaacctccgcctcctgggttcaagtgattctcctgcctcagcctcccaagtagctgggactacaggcacctaccaccacgcctggctaatttttgtatttttagtagagacggggtttcaccattggccagggcggtctgaactcctgaccttgtgatctgcctgtctcggcctcccaaagtgctgggattacaggcgtgagccaccgtgcctggccgatttatttatttatttatttatttattttgagatggagtttcgctcttgttgcccaggttggagtgcaatagtgcaatgtcagctcaccgtaacttctgcctcctgggtttacaagattctcctgcctcagcctactgagtagctgggattacaggcatgtgccaccacacctggctaattttgtatttttagtggagatgaggtttctccatgttggtcaggctggtctggaactcccgacttcaggtgatctgcccgcctcggcctcccaaagtgctgggattacaggcatgagccaccgcgcccggcctatttatttttttgagacagtctcactctgttgcctaggctggagtgcagtggcacaatcttggctcactgcaatctccacctctcaggctcaagcgatgttcccacctcagccccccaggtagctgggactactggtgcatgccactacacctggctaatgtttgtatgtttttgtagagacggggtttcgtggtgttgcctaagctggtctcaaactcctgggctcaagcattcctcctgccttggcttcccacagtgctgggattacaggcgtgagccactgcgtccatccagattcatgatatttagatgttgaaatgtggctttacagactcagacagctctctgaggcaaacaaagagggagatgcaggtaccctcagcacaagccccaaattacctgcaggggagaggcggaaaatcagacaatgtagaaaccgggagaagaaaggtatggacagaccgatgcagataggaggggaaggaaatacctggaaatgagatagagaccggctggacagaccccggggaccctgcaggtcaccacacccttctctttcagctcacctgttctccaggaccagccctgctggggcccaggcccaggctctgagaggccgtgtcctaacctgccctggccccggagaagctacgttgccacctgtcccccttccctggcctggtggggcctggctttggggcaagactgagccacgggggaagggggaatcccgtacctgctgctgcttcctctgtcttggctaacgtctgtccccctgaacccctaaccataccccaagagctcccaaagcctgagaccagggtcatttgtccccaactccccatctggccctgctgttgctagtacctgttatttattacctggaggcctgtccagcacccaccctacccccataaagcattgtttacacctgtgtcttggcctccattattgtgagatggcagggagatggaagaggtccctgatggaagaatcatgtgtcatggtgtttgggggccttgtttctgtttttttgttgttgttgttgagatggagtttccttcttgttgcccaggctggagtgcagtggcgtgatcttggctcaccacaacctccacctcccgggttcaagctattctcctgcctcagcctcccgagtagctgggattacaggcatgtgccaccacacttggctaattttgtatttttagtagagatggagtttctccatgttggtcaaggttggtctcgaactcccaacctcaggtgattcgcccgcgctggcctcccaaagtgctggaattacaggtgtgagccactgggcctggccttgggggccttgtttcctgattggacgtggtgtggggtataccaagcatgatgactcaggtgcctgttgcggagggagggaatttgttactgtgtggacagtttgtgacaatctgtgttctaagctcacgtgtgtaaacacgctgatgtccctgtgtttgtgacatgtgtacatgtttccagtacctgcatatgggatgatgtctataggatataatgtgtgctggttgtgtgtgatgctgacagccgtaactgctctgtggccttggtcattgtattggtgaggctggtattgtttgggacatcaaggccaggggatgggaatttggacctataggtgggcctccggtgtgtgcatgtctgatgcctgagagtcagaggcagtgactcactactgcgtgtgtgcctgtgcatgtgtaccccgaggtctgtgtgtgttttggtgtgaatttggctccttttaaacacccatgtgtggccaggcgtggtggctcatgcctgtaatcccagcacttcgggaggccaaggcagatggatcacttgagcccaggagttggagactatagcctgggcaacacagagagaccctatctacaaaaataaaaaacagaaaaagttagccaggtgtcgtggtacacacctgaagtcccagctattccggaggctgaggtgtgaggatcactttagttgggaggttgggcctgcagtgaactatgatcatgccacagcacttcagcctgggcaaaagggtaagaccccatctcaaaaacaaaactaaactagaaacacccttgtgtggccatgaaccctgtgtgtgccctgaggactgcgggcttttgtgcaatcctcacgcatgtgtggataccagtatgcatgcccttgtgctcacgcgaaccgccctacgccctcaggtggcctgcaggggactggtgcagccccgaggacactcccagttgctcgtcgccctcccatctccacgtcggccttcaccgacccggcgggagccttgagtcccagctctccagagcaatggtggagcgggcagggcattcaaaatgaccttatctccttagtctcctaaagtgttcccagctggccatgcaaatgtcttctctgtgtagcgttccgtggatttttttttgtttcattttttaattttgtgtaaagataaggtctcactccgttgcccagactttccctggttctttattctgattcccacaatcgtcccgagggggcaggccggagcgggtcttgaaaatacacatttgcacatcccttctagtccgcgttcccttttctcaagggcaacccgcacttttttgcctccgttataaaagatacttatgtaaattactgacgtgcgaatttacatacatttctcaactaactgcgtagccatttctccgtctctcacctccgttcctggacggcgagaaggaggaggagctgaccatgtaaatgaagtcacgcgcaccgcgctgccgaactcggtgccccgcgctgggcggggggcgggtaggcctgtccatgtaaatcacatcatttgcgtgccccgccccgccgacgccacttgattccaacatgcaagaaacgccccctcccagacccggcccctcacactgcgttccccctcccgcgcaaagggggcggggcggaggatgcaaatgaacctcgtgtaggccacggaccgctgtttcctttctccttggtaggggggttgtcccgaacttcctcgccccgctccgccccgccccgcgcggctcgggcctgcgcaggcgccgtcccctccgcggggcgcggtcacgtgcccaccgggcgaggcggggcggggcgtcgcgcgcggtgggggcggggtatggcgcgctgtgcggcgcagggcggctggcacaaacggcggcgccggggccggaggaaaaagctcggtgaggaggtcgcggggcgagaagggagcgggaggagactaagccggagccggggcgccggcgcgaaccgggcggggtgtgggggcgcgcgccggggcctgccggggcgaccccgggaagggggatgtgggtgcggcgcgggggaggggacgcgcgccggttacgttgggtgccggccgttgtgggggttggggtgggggcggggagcgcgcgccgggcggaggccgagtggagggggaggggagggggtccgagcggcccttaggccctgcccctgtcgcctactgcgctcagaaggggcctcagggcctgccccgggttgggggcgttggggtgccctggatgggggcacctttatctctcgtcctgtctccgggtgcgtgcaccctcctccgtcctttcctctgtcgccgcggaccctctccccgagggcccctcccgtcggtcagtctcgggacctcccttccgtctgggcgtgtgtccgcccccggccggcttcctcccgtcgggctcgggtcgaccccaccgtcccgctccgccccgggtcctccctcccagcttccctccggtctatttttctgtctctgggcccctcgttctctttgtttttggactccccagtttcctctgtcttttgacccccccgcccccaccctgactctccctggaacccccacgtttctcgttgtctttctggaacgccgaggcaggtccctcctattttccaaaccccctcctttcccactcctccacaccacccttttctactccagccctccttcttctgtctttggttaccgcgtcccacaacctgcaccacagtcctctgtcttagggtcatctacccagcccctggcctccagcctctccctatcactgcctcttatctgtcagcggactcccgcacctccagattctcagggtcctctccccgacttggcctcaggttttggggggcctctatagtcaagtctgtcctggtcgtcttccccactcctgcccataccatcccggctttcccctgcctgcctgtctctagtttctctcacatccctttttttttttcctttctctagccaccctgaagggtcccttcccaagcccttagggaccgcagaggacttggggaccagcaagcaacccccagggcacgagaagagctcttgctgtctgccctgcctcaccctgccccacgccaggcccggtggcccccagctgcatcaagtggaggcggaggaggaggcggaggagggtggcaccatgggcccgggcggtgccctccatgcccgggggatgaagacactgctgccatggacagcccgtgccagccgcagcccctaagtcaggctctccctcagttaccagggtcttcgtcagagcccttggagcctgagcctggccgggccaggatgggagtggagagttacctgccctgtcccctgctcccctcctaccactgtccaggagtgcctagtgaggcctcggcagggagtgggacccccagagccacagccacctctaccactgccagccctcttcgggacggttttggcgggcaggatggtggtgagctgcggccgctgcagagtgaaggcgctgcagcgctggtcaccaaggggtgccagcgattggcagcccagggcgcacggcctgaggcccccaaacggaaatgggccgaggatggtggggatgccccttcacccagcaaacggccctgggccaggcaagagaaccaggaggcagagcgggagggtggcatgagctgcagctgcagcagtggcagtggtgaggccagtgctgggctgatggaggaggcgctgccctctgcgcccgagcgcctggccctggactatatcgtgccctgcatgcggtactacggcatctgcgtcaaggacagcttcctgggggcagcactgggcggtcgcgtgctggccgaggtggaggccctcaaacggggtgggcgcctgcgagacgggcagctagtgagccagagggcgatcccgccgcgcagcatccgtggggaccagattgcctgggtggaaggccatgaaccaggctgtcgaagcattggtgccctcatggcccatgtggacgccgtcatccgccactgcgcagggcggctgggcagctatgtcatcaacgggcgcaccaaggtaaggctaggtgggggcctctttggaggggctttgcagcaccctggtttgcagcattcagtgctctgagcacagtgggtttggagacaggcttctgggaggtcacagaaggtttaggcagttcagtggagtgggtatgcttacttgtggggacttgggggggtctttatcctccctacgggccttaatgtgtgcacctgataagctaggagtttgtcctggagccacagtggttcttttttttttttttttttttttcttttctttttttattgatcattcttgggtgtttctcgcagagggggatttggcagggtcacaggacaatagtggagggaaggtcagcagataaacaagtgaacagaggtctctggttttcctaggcagaggaccctgcggccttctgcgtgtttgtgtccctgggtacttgagattagggagtggtgatgactcttaacgagcatgctgccttcaagcatcgccacagtggttcttgactttgccaggaaccctcttaaactcatgagagctgctgacattcacagcgtggaccttggtggggttcatggcctcctggtgtcagtctgtggccccagaccaagcacggggatgtagataggcacacagttcacctggccgttctctgttgctgtctgtccctgtccacatccttccctgtgctcctgtcgtccatccctgtttgctggcccatgtttctagtccatccatcctgtctccaaggcaggagaagcagaagggggagggtggctgtgatgagtgagccctgggctgagggaaggaaaggggtgctgcccgctgggccgagtgcttggccctggactgcattgtgccctgggtccccactgtggcatctgcatcgaggacagtctcctgggggtggtactgggtggctgcctgttggcccaggtggagctcatccccatgtctcccacccttcactgtcccagtccctgccctccattccccctgtcctgtgtgtcacttcctccctacccatgtctgtctcttcctctgcctttatgtgtttgttcttagtccctttttctttttgctttagaacaatagttcttaatggtattttggagcctgggtctttttgagaatctgtcagaggccacagatcctctcttaagacaaatgctcatttgcttggagtttccgggcagttgtcaaggcctcatggcctccagctgcctgttcaggaacctggggtcaggagcccagcacaggacagtggtccatagggcctttccgggctgctgacaggatcattgtcttcatgggtggtgtgggggcctggccttgagtccaaggcttggtgtcctttggacaaggccctgtggggagtgcccactgctcaacacagtgatgcctggctggctgatggcacgggcagtgttgtgccctgcaggcgtgaggctgagctcctgatgtcctctgcctcctcctgcagatcccatcttgggttctgcttctgtgtggctttcctctcaggctggagctggctcagggaccagggctcccccggggccaaggcctgtttcctccccaccccagctggaacttgttctacttccctctccctcccgttacttgatagctgagccagagccggcccctccctgggcttggctcctgtgcgggcgggatcagtggcctccctggctcagcatcttcaccccaggttggctgtcgtcctcgtcagggggagaccagaagggctgagtggcccagatgggacactgctctgagcctcaatttgctgatccacggaatacgaaaaccaggttacatccccagtgagtctggcagtttggggaggggagagtaggagaagatctcttgtgttttggtgcctctggtgcccactttctatgtggttggggacagggccccagcgaggattggggaaggggcgtgtttggacttttttagccctaggtgaccttgattgtcctagggaagtaaggacaggccaggctggactgagaacataggggaggagccctcccctccccagtgagacagcaactccaggctttcccgcttttagatgggccccatctggactctctcctgtactccagagtaaggctgtggggtgctcaggtgggctgcagcagttgccgtggggacatggatcaccagtgtggctagagccagtagaaacgtgcttcttagtcgttctgagtggagctcctgtgtcatccttccttcccccaactccctggttggggacaggtgctccgttgacctgtaggtgggagagagttgactcccactggcagcaagggctaccagaggggaccccagggagagtccagcttgcttggtttgctccttgaagagcagcttggaggtgggacagtcacaggcttctgactggggtgtgtgtgtagtgggggtggggctcttggcaggcagattgtcaccaatagcctttaagtctttggtctcctggccctggtcccacctgtccctcccctaggtgggaggggtggagagcaagtttcctgaggccttcccctgtgagggcaggaagtagatactttccttggggccagaggatgctttcacccccaaggtgtgtatatgtgggggaagggtggggccctaaagagcaggttcctgtttctgtgtgagtcccatgtgcttggtgggaggcgctgtgtgagaatgtacagggcaggaggaaacatagcagggctggggtgcagaggaggcccagagcagtgcactccagtctgcaggtactgcactgggcactggggagaccaacctggccccaggggcttccctgtggctgccttccagggcagtactaggtaaacaggtgcctgtgctgatgccatgttgctaggagtggaacggacaatcagccggagtactcaaggtgacccttggtctctgaatcctgaataacaaagagggtcagaaggaagagtgtcccaggccagtgctgaggccttgtggtggcgatgagctcagcctgttgaggcatggagcagagtgatgggagaggcacatgaggttgggggcctttgaggctgtggttgggaatttgtattttctcaggatggagtgaagacctggagaggaggggctctggctgctgtgtggggatgaattgtgggaagagggtgcagcactggaccccttccctgccacccatccacgtgcatcatcagtgtaatctctgattggattcctaattggggaggtcttgcccatctctagtcagtaactcactgtttctaagcctcctggaccatggcccaattcttctcccagtgaggtggttgctcagagtgccgacccttccatagggagtgagcagtgcaaagaaggtgccccctcctgaaccttgaagtgtagccattagggttttccctggggggccttctcactaattgtactctggtgctgccagagagaaggttgtcagcttcccactgctaggtggcagtagatggtggcagccctctctttccagggcaaggtctggtggatgaggtgcacatggttaatgcagagcagcttaacatccaccacagagggtgagccctgggataatgtgttgggaggcgtcctggggagggtgaggattgaagcagcccagtctgctgtggcgtgcgtgcttggcaagcatcctgttgtggcagtggccactgatgtttgatcgtgaatgtttatcttgggactgtcttgctgggccgggcccataggtgtagctgagcattcgtggggaatggacgccagcagagttgtaccagggcagagaggtcagggcagagaggtcaagacagatggtccgggctggggagaagttgaagggtccttgtgccagtcctcccctttttgtgtgctacctcatcttgccactgcagtgactttgggcagagggtgggacagggaccttttaaaatttttaaatggcatttcagcctgtgctccagttctccatgtggcaggcactgtgctggctgtcttcccagacacttgttatcttgttcacttgttccacaacaacctgtgaaatagctgtgagctccattggatccatggatgaggaacctgagaccaggaagtcacctgcctgatgccacagctcatgtggcagcactgagacttgaaccagggaattgtgtctgcagaagtggctgggccatttcctttacctctcagccacctttctgccagctccctgatgacaaacatcccggggccctggccacagcattgtagggctgggtcaggggagtggcaactgtcaggcagaggaaagaaccctgtagacagagaaaccaagccctgcaatgagtcctgttagatctccaggagttggggctccagaacctcccaagttatgttctcagagagattaattgctaccgctgtaaacagcagtgtttattacccctgctgtacacatcaggcagttgaggcccattcaggtgttggaactggctagggttacccagcaaattatccttggagttggaattaggtctttctattcagactgtagcttttggctcctgttcggaggtctatgggacagataatttagtggggattctttgtagtccagggcagcagttcttaacattgctgcatggtagaattacctgggaagctttaccaatttcaggcccttccttaggccaggtacttcagaacctcagagctccccagggggctccactccacagccaagggtaagaattcctggtctagggctgtgaggccacctccttgcacacctgaaaatgtttaaattggtattattctactgaaatggctgaggtggggtttggggtatcttgaaacaaatcaaactctgttactaattgagccctagctgggtgccaggccccaggtatgtgtgttgggagggagtgggctcttgaggcccaggagctgaggtttctgatagacttggggatgggattttggctgaaaaagaaagtcttttggggcaggagcttggaacccttgacccaaggagtcatggggaagatggggcaaggaggggtgggaaaataggtaattcatggctgcttctctaagatgtgcctgcctagccccagtaaacctacctccctccatccctgccaggccatggtggcgtgttacccaggcaacgggctcgggtacgtaaggcacgttgacaatccccacggcgatgggcgctgcatcacctgtatctattacctgaatcagaactgggacgttaaggtaggggtgagggtgagggtgagggtggcgctggggctagggctggggcgggggtggcgtgcgtccactccattttccactctcagcccagattctggcattctcctgtttctcttctcaacacacagcgggcagtgcgatctgccggctcttcctgggaaatggcacctcctcctctctagcggactgtgtggtgggaactcccctctttccgggaatggtgctgtctgcccagccccacccggccttgtaatgaacactttcccccttttcctgtctttagtagcttcctgcccatctccatggtgatgcagtctctgggttgtcattcactttgagagcccgaggggtgggagggagtgatgcaggcagacgctgcgcctcctagtgggctcccggggcaccgtgggaggcagcggctcctggccgtaccagctagcctcatcctttggcctgcccccaggtgcatggcggcctgctgcagatcttccctgagggccggcccgtggtagccaacatcgagccactctttgaccggttgctcattttctggtctgaccggcggaacccccacgaggtgaagccagcctatgccaccaggtatgacctgtacttctggagacgcacccaggtgctccccctgtgacaatgtcctgtcagagcctcagagtgactagggagcgacgaagtattgagagggggcctaggtgggagcagaaccgggtggctcaaaaggatggccgcctagtgtgtgtggatatggtagctggaattgcagaaaactaatgtccaaccaccctggtctccaggtacgccatcactgtctggtattttgatgccaaggagcgggcagcagccaaagacaagtatcagctaggtacctgcttccctcccttcagtccttcctattctgtgggccctcttgggcctgatgccaccccatccccctcatcagcctcttgttaaatcccaccactcatttttcttcatctctgcccaccttccttagcccactctcctggtaccccaacaggagccccatttcttcctggtcctctccccatctccccaggtttcccttggcttctttgtccttctgatgactcactgtctcctgtcccctctcacccccagcatcaggacagaaaggtgtccaagtacctgtatcacagccgcctacgcccacctagtggccagtcccagagccgcatggcagacagcttaaatgacttcaggagagccctgggcctgtgctggctgctccttccctgccaccgctgctgcttctgactttgcctctgtcctgcctggtgtggagggctctgtctgttgctgaggaccaaggaggagaagagacctttgctgccccatcatgggggctggggttgtcacctggacagggggcagccgtggaggccaccgttaccaactgaagctgggggcctgggtcctaccctgtctggtcatgaccccattaggtatggagagctgggaggaggcattgtcacttcccaccaggatgcaggacttggggttgaggtgagtcatggcctcttgctggcaatggggtgggaggagtacccccaagtcctctcactcctccagcctggaatgtgaagtgactccccaacccctttggccatggcaggcaccttttggactgggctgccactgcttgggcagagtaaaaggtgccaggaggagcatgggtgtggaagtcctgtcagccaagaaataaaagtttacctcagagctgcacacatctgactccatctgcaatttagggcctttattgaccgaggagggtatggaggtttgagggccagtgagcccaccatagtggagcctgacctcagcaggccactggctggagctggaagtctggggggacactgcccaggccagtgcactgcaggtgaggttgatggtgccagggcgtaccacagggagcaggcagaacctctgtaaggtggccgtaaggaataggaagatacccgagtgggccaggcctgtgcccaggcacatctgctttgccgggtacacaggtgcacagtgagcaccaggtaccccagagccagtccaggctggtccccttcctcctctgcctgcacctgaggcaaagggcatgaaagcatcattgccctggaacttgcccttgtccaggaagttggtagggttgaagcagtctgggtctttgaattgagtggggtcccggtgtgcagtcacaagcaggggaatcacaaaagtgccctggggatacatgcaacttgggttacctgcgggcttggtgagcacctgcaccacctccatccaagacgctttttaaaagcccaagggaataggccgggcaagtagctcacgcctgtaatcccagcactctgggaggctgaggacagatcacttgaggtcagaagttcgagaccagcctggccaacatggcgaaacctgtctctactaaaaatacaaaaattagccaggcgtggtggtgggtgcctgtaataccaggtactcaggaggctgaggcaggacaatcgcttgaacccaggaagtggaggttgcagtgagccaagatcatgccactgcattctagcctgaatgacagagccagactccgtctcaaacaacaacaacaaaaagcctaagggaaggcagagctgccttcctgctccaggggtaactgattgtgttttggtctgcacagcgcacacctgctgattctggctgatctcatgcacccgggtcccgcacgggatccccagactcagtgggtacctttgggcagacagtggctgtgcaggtgggtgtcgagggtgagggtgcgcggcagccccaggggcaccacgctgatgaagcactggatctcgagcagcactgcgttggcgtagggcaggcacacgcgatagtccaggcttggggcgggcctccaccctaccacagggtccagctcctgcaccttggctcaggccgggggaggctgtgagctgcgcacttccaggaccctccagccatccccagactgcagcctcccattctgggtctctccgggttgcacacctgccacctctaggtacttaagcagaatgaggagcccatagcacagggtggtgctcgtggtttcggtgacgccaaaaaaaaaatgcgtcgtcattaccgacgtctactcctggaaatggctctccgggtcctgctgttactgtgggcagaggagatgtgctgccgcgtgccaggcacctgttggtgggcggcatggatagagtttagagagctgggacccatgccttacccatctggtcaagcaatcaatgaaatcgcggggctccgctggctgccgcatctgccagtgtcgttgaatttgctcagagatgacccgcagctccgaaaagtttcggaagattcggtggtgcgggcccgggagccagtccatgagggacaggcaaatgtacatctggagagacagggtctgtctcaacatgggccctgcacaaggccactaggccttagtttccctacagggagattggactaggactttgatactggatgttctagaactcttccaggaatctgtcccattctaatgatccattgtaggtaggtctgtgtactcgggatttggcataaggctggacgcaccaaggaaagattgtggccggccctctcacctcgccccatctggaactaatgatgcagaagttgtcactgaagaggttcaggagcctcaggaactccgggtccccatagcgatagcggttcccgaagacaagaacagataacattggatacagcattatccagtagccgcacggggtcaaacggggctcctgggggtaggaacaggacggtggtcataacgcgtggtcctgcccccagccagccccatgggcttactggctttcttccacccaaataccttccagtggccccgtcttggcagtgcaagggactctcccacaccaggcccttccgctctcccggccaggccgaagcaatggtggcttgaaattcgtctagcagacaagccgcctcctccaggacgcgcgcctcgacggtccgcgtacccaacccgaacttcttaagcgctccaagtgcaaaattgcgcagtgtccaccagcacggccggttagaaaacaagattcctgtggtggggacgggaaaggaggcgggccggggagccggccacgccctatccaggaagcgccgggtcactggctacatccctttaggggcctccgactcctgcggccggcttcgttccctttgcttctttaccagacctccaagtgccctatccacacattggccccgcctttgctgggctccatccctgacctaggctggctctcgggctttgactcttaggctcttttctcctgttggctgcaggatgaacctccattctaaccttacgctttagcgccgccccgccctctctcggccgtttgcacctcattagctggagtctctattaggccccgcccccatttgcccgcctctaccatttacccgcccagcctggagcgtccgggccggcaagtccagcgccggggcctcactgtttccgcgtgtgaagcgttcgaagactgccatggacccgcggccagagaccgcatccgcctgtagcactaacgcgtcccgcagcgctgcgtagccgcacagccccaccgcagggcgcgggcccagccgcactgtgaacacccggccccagcggccggagagctacgggtagccggtgctcagcgggtgcccatagggttcctcatcggagccattgcccccagctccctcttccttcagacccaggagtcctcgtctcagaccctcattcctcaggcccaggaattcaaatccccagctccttcctccctgagatccaggagtccaggcccccacttccttcttcccttaggacctggaagtccagcttcccagcctcctgcaccctcagagtcgtctcctgggccctcagtactcagcctgcccaccctgaaccagaacagaccccctgctcccctcttcccacaacctgatttcctgctctgggctccttcgttacgacccagtgtcccggccccaggctctccactccctattctcctttcctagtactcagcagtccggagcactcatccttcctgtccttcctcaggatcatagagtacaaaccctcagctgtcttcattcaggaggagttctagtccccagccccaccttcacgaatccagaattccgttcccccattcctgtcgggaatggagtgcgcggtccaggcctccggactgcagctgcaagttccccagcaatgggagcggcctgggccggggaggtagggacccccgcatctgagcgcggcacccaccctacccccaccacgccggcgccagcaccagaagccacaacagcagcgcagcgatacccgcgacatgcctgcaattctccacgcctgcaccccttcacctctatttgatttccaaggggtcttaggggtggagcggggcggagacccgatgtgggaggagtgggcgtctccgggctgctcattccgtggattccccaacccgacgtctccaccccgcccccagccctagtggagctgtgccctggctccccctggctttttttgtgtgtctgcctcagcctgtcttacttagcaactttcgtgcaccagcattttcatggcaacacacctggacaacaggtgcaccctcctgagcccctagcacctttgagtccaatttacttggcctgtaagtgtgtattcctcaatctccgggccacctctgggtcccctgaacgctgtaccctgtacctctgattcctaaatacacaccgactctcaaatacaccacttctgttttttttttttcccttcttagagtttcactcttgttgcccaggctggagtgcagcagtgggatctcggctcactgcaacctccacctcccaggttcaagattctcctgtttcagcctcctgagtagctgggattacaggcatgcaccactaggcctggctaatttttgtatttttagtagagacggagtttcaccgtgttggccaggcagatctcaagctactgacctcaggtgatccgcctgcctcggcctcccgaggtgttgagactacaggccactgcgcctggctcaaatacacttctaaagacacccctggcattcctgtgctctgtgcctgtgattcctaggagctcacacctgagcccttgtcacttccattactcttaggaccctgtgtactatgcttgttccccagatctgccttcaatttccctggcttctgggtgtccatcagtctggcacttctgtgcctctccttagttcttcagggtgcctttctgcatgttgatccccttgtacctccatattatgtcctgccctgaatctaccatctctatccccaaggcactggctcccagatgcccccaaatgttctgtgcccatgctgctgaaccccctggtatccagtcccccaagtccctgtctgaggccaggccatgacgacagacaaacttatccctcattctctcatctatcccccccaacccccatcctagggcatgggctagagggggcagactctggcctggatgggccagggctgcggtggtgggagcagtgaggttggggctgtatttggaacagactgttcaggaatgtggtccaccctcctgcctgtccctgcttggccaaatccagccttcctccaagtgcctggcacagggcccagacctggggagatggtgggcggggggtggactgtgcagagcctaggactggcattgtctctgggagggtctctgtgtatctttgtttcatctctcagtcttgcttgctccctccctccctccctctgtccgtccctccctccctccctccctccctccctccctccctccctcccttccttttttcttttttttttttgagacagagcctggcttctgtcccccaggctggagtgcagtggtacgatcatggctcactgcagcctcaacctcctgggatcaaacaagcctcccaccttggcctcccaagtagctgggaccataggtacacaccaccacgtccggccaatttttgtattttttaaggagacaggatgtcactgtgttgcccaggctggtctccaactcctgggctcaagcaatctttctgccttggtctcccaaactgctgggagtatagttgtgaaccagcgcgcccagcctccctcactctcagtctctgtgtttctgtgttcatctctctctctcctctttctgtctcttcccatctctctctcttttctctcagtctctgcctctgtttgtgtctgttttctgtctctcttttcagtatgtctgtgtcttcccctccctgtatctcccctagtctgtgcttccctttgtctcagcctggcacttctgtgcctctccttatttcttcagcgtgcctttccgcatgtttacccccttgtacctccatattctgtcctcccctatcctgggtcttcctacctgtcagcctttctggaacctggtgactgacaggggttgtggggcaggacccctgctcagagctgctgactccactgacagcgggagtgtggtggggcacagtaagctgcatcctcccccagccctaccccaccctctgtgacaggctttaatggatcctgtttattatggcttctggtttctccccagctcctgactcttcctccgttttgctcgggtgggctgtcctctggaatgtcagctcttctagagcagggattttgtcttgttcgcttctgtatcccagcacttaaagtagtgcccagcacagcagtaggcacttagtaaatgtttgttgaatgaatgcccaatttttcttcctcgctacttctctttgtttttttttttttttttatagagacagggtcttgttaggttggccaggttggtcttcaactcttggtctcaagcagtcctcctgcctcagcctcctaaagtgctaggatcacaggcataagccaccatgcccagcctctttcttccctcccctcccctcttttccctttcttcttctcttcccttcccttctgtctgtcttgttctgtcgcccaggctggagtgcagtggcaccatcacagctcactgcagccatgactgcctgggctcaagtgatcctcccacctgagcctcccaagtagctgggactagaggtgcgtgccaccatgcctagctaattttaaaaatatttatagagaccaggtctcactatgttgcccaggctggtctcgaactcctgggctcaagtgatcctcccgccttggtgtttctatctctttgtaattagactggatttctctgtttctctctttcttttcctccctttttctttttctctcaggtctctctatctctcttcatttctgttctctttatttatctttgctttagggtctctttgtctttcctctctctggacatcactgtctttcccttttctcagtggctctctttctcctcccggtctctgttttccaggatctctttgccatccctgcgtatctgtctcttccttttcctctccatctcttctcagtgtcttcacgtgtttttctccatcatctctctctgcctgtctttctcaggacctctgagtctctctgtctctccctctcttctccctctctcccccgacctctgtgtccctggctgggtcctggggcagactctggtcagcctgtgatgggaacagtgtggggattaaagagctgacatcttaatccccatgtgggcactgcctataagcctcactccagtcagccccatgctcagcagagcatgtcccagtttctgcatcactttggggagaccccgttcagggtagagcctcccaggccacctccactgatggctgaggggccagttccactctgcctgaatctggctcgatgtgctttgggacgcctgcccagcgagaacagccactgtcagcaggatgttagggtattaggtcgggtcccaggttgggagggtacatgcctggggttgccatcctcatcccaaaggggagaatttcagagaatttcagtgagagggtgggagggccgagtgcagtggttcatgcctgtaatcccagcactttgggaggctgaggtgggcagatcacttgaggccagtagttcaagacaagcctggccaacatggtgaaaccccatctctactaaaaatacaaaaattagccgggcatggtggtgcatgcctgtaatcccagctactctagggaggctgaggcacgagaatcacttgagcgctgaaggtggaggttgcagtgagctgagatcatgccactgcactccagcctgggcaacagagtgagactctgtccccccaaccctccaaaaaaaaaaagaaaaaaaaagaaagaaaaagaaaagaggggctcgggattgagggagagagcctcagtcctcagaactcccattgtcattgctcatctgtctttctctggtcatttctctgtttctttccattttctctctcaattcccctgcctcccatttcttagtgtcggtatttctctgcttttctctgtatttaagggtgtctgcctctttcttggtctctgacttgtgaattaaaaggtagtagttagaagtgcagtgtctgagtagggcatggtagtgtgcacaggttgtccagaactttgggaggctgaggctggaggatcacttgaggtcaggagttcgagaccagcctgggcaatatagtgagactgcctctacaaaaaataaaaataaaaaaattagtggctgagtgcagtggcttatgcctgtaatcccagcactttgggaagctgaggtaggcagatcacctgaggccaagagttcaagaccagcctggccaacatggtgaaaccctgtctctactaaaaaaaaaaaaaaaaaaaaaattagctgggtgtggtagcgggcgcctgtaatcccagctgctcgggaggctgaggcacgaaaattgcttgaacccaggaggtggaggttgcagtgagctgagatcgagccactgcactccagcctgggtgacagagcaagactctgtctcaaaaaataaaaataaaagtaaattagccaggtgtggttgtggtgcaccctgtagtcccagctactcaggaggctaaggtgggaggatcgcttgagcctgggaggctgaaactgcagtgagatgtgattatgccattgcatcccagcctgagagacagagtgagagcttgtctctaaaaaaaggaaaaaaaaaaaagaagaggaagaagaagaaaaagaagtgcagtgtctgtagcctcagagtctgaatttagataccagctctgcctgtttctgtgtgatcttgggcaactcacttcacctctctgagcctcagtttgctcatctgtaaaaatgtggtaatactgctttgtggccaggtgtggtggctcatgcctgtaatcccagtgctttggggggatgaggtgggaggatcgctttaggtcaggagttcaagaccagcctaggcaacattgcaagaccctgtctctactaaagattaaaaaaaaaaaagttagccaggcacggtgactgtagtcccagctatttggtgatctgaagcagaagcaggaggatcagttgaacccagaagttcaaggttgcagtgagccttgaattgtgccattgcactccagcctgggcaacaagagggagaccctggctataaaagaaataaacagggtaggtgcggttgccggtggctcacgcctctaattccagcactttgggaggctgaggtgggcggatcacaaggtcaggagattgagaccatcctggctaacagggtgaaactcttgtttctactaaaaatacaaaaaattagccgggcgtggtggcgcacgcctgtagtcccagctactcaggaggctgaggcaggagaatcacgtgaaccagggaggcggaggttgcagtgagccaagatcgcaccactgcactccagcctgggtgacagagcgagactctgtctcaaaaaaaaaaaaaaaaaggaaagaaaaaagaaacaaaagcccccaaaacaaaccagagcaaagtagggagacttaaatgaggcattcagaacagtgtgcaaatagggagtgtcatttagtgtcagtgcttgttccatcttagcctcactttgccctgctttccccatctctctgcagtgccctgcatctcttgcatattctctctgatatctctctgctgtcatcttcttcttgatatctctctgctgtcttcttctttttctttcttactttttttttttttggggggggtctcactcctgtctcccaggcgggaatgcagtggcacaatgatagtccattgcagcctcgacctcccagactcaagaaatcctcctgccccactttttgacttttttgtagagtcaggcctcactctgttgtccaggctggtctcaaactcctgggttcaagcgatcctcccgcctcggcctcccaaagtgctgggattacaggtgtgagccacttcgcctggtcctgctatctttttctctgtcttggtttctctgcctcactggcttcaggtcctcgcagcctttaccttcaagcctgtctccaggatacaatttgtcccaccctagccaccctaaaggtgagggcaaaactagccagtgtctccatctctgcagccagctcccttctccccatcctaaatgactctcattctcactttaattcagccaagactggtttgaatctattacaatgtactaagaaatgatacaaaaagcccagaaaagggcgtgccatagaacaagctctgtgggtacaaaaagacatgccacatctgcctctgccctgcagacggggtacagattggagggatgggggaagggcacgcggcaggcacagcatgcagggaagacagcgtgactgccagagggatggaggcagaccgtggaccaagaaggggacgtagcaacccacatgggtgggcctcatcgctcacaggcgaatctggaagggccggggcgttagcgcgggtgcaggcacagctggaaaggccgcggcaaattgccaagacctgagctgagcggggtcaggtcgatgtcctcgggcgcacccagcggctgcagcgaaaagctctgcaggatggcggtgaggtacagaaagagctccatgcgcgccagcgactctcccaggcacagacggtgccctgcaggggtggcaggatggggagcggtggtgagataagatgaggttagaggctgcaaccccacattcccagaggaaaacataagaggaaaggaagacagcagctggggacgtcacagattcacccatgtaaagatgtgggaaagatgctttaaactgtggagcggaatgacctgggctgcttgggttcgaatcccggtgctgtcactactagttttgtgatcctggacaaaccacactttctgggtatttaaaatggggatatgaagactgggcgcgctggcttaggcctgtaatcccagcactttcggaggccgaggcaagaggatctcttgagcccaggagtttgagagcagcctgggcaacacagcaagatcccatctctataaaaaatttaaaaaaaaatgtgcaaggtggcacatgcctgcagtcccagctgcttgggaggctgaggcgaggggatcacttgagcccaggagatcaaggctgcagtgagccatgatcgtgccactgccctccagcctgggtgagagcaagaccctgtctcagaaagaaaaataaaaggagggatagtaatagtgcctcatgaggctgctgtgaatggtaaacacagggaaagcagtgaggctgtaagtagctcaccatgggccatgccctactctaagcattacatcacaattaattctaacaactccaagaggcaggccttagtattatctccattttatagatgtggacattgaggtacagagaagtgaagtaacatacccaaggcaacacagctagggggtgacagatgggatgcaaaccctgctggaatctgggctgcacattcccagcggaaaacataagctcttagctgggctcttgtagaggcagcacttgacgcacagtaggcaatatggtaagttacctattattatgccagttgttttttcttttcctgctactgagtaaagagggaagtatttttcagcagggtaaagaggaaagccaaaaaacaaaacaaaacaaaaaccctagaaccacctcaactgcgccacccagtggagaggtagacaatgaccactcccaagttcaattattattttttcttttaaacattttatatattttttatttttggctagtcagtattttttattttagagaaaggatctcgctctgtcgcccagactggggtgcagtggcatgatcatactcactgtaacctcaaactcctgagctcaagtgatcatcccacctcagcctcccaagtagctgggaccgcagatgcacaccacaccacatctaggtaatttaaaaattttcagtagagaaagggtcttgccatgttgtccaggctggtcttgaactcctggcctcaagcgatcctcccacctcagcctcccaaagtgctgggattacaggcatgagccgatgaacctggcccaagttaaataataattattataattattatttatttatttttttgagacggagttttgctcttgttgcccaggctggagtgcaatggcgcgatctcggcccactgcaagctccatctcctggattcaagtgattctcctgcctcagcctccagaggagctgggattacaggcatgtgccaccatttcctgcctaattttttttcttttttttttttttttgagatggagtctcactctgtcgcccaggctggagtgcagtggtgcggtctctgctcactgcaaggcccgcctcccaggttcacgccattctcctgcctcagcctcccgagtagctgggactacaggagcccaccaccatccccggctaatttttttgtatttttagtagagatggtgtttcatcgtgttagctaggatggtctcgatctcctgaccttctgatctgcccgccttggcctcccaaagtgctggtattacaggcgtgcattcctggctagttttgtatttttagtagagacagggtttcaccatgttggtcaggctaatcttggactcctgacctcaggtgacctgcccgcctagatctcccaaagtgctgggattacaggtgtgagtaactgcccctggctgttaaattattatcattattttttttgagacagagtctcgctttgttgccgaggctggagtacaatggtgcaatctcggctcgccgcaacctccggctcccgggttcaagtgattttcctgtttctcctcaggagtagctgggactatgggcgcccaccaccacacccggctaatttttgtattttaagcagagacagggtttcaccatattggtcaggctggtctcgaactcctgacctcaggcgatccacccacctcagcctcccaaagtgctgggattacaggtgtgagtcaccatgcccagtcccaagttaaattattaatcaacctccccaccttgcttcacgaggattttagtcactacttgcctataggagcagagttgagaggaggaatgaatgtctctgtgcatccaaagctgagaatgggtggaaggaaggagtgagcggatttggcaagtggaattaggatgaggaatgtaggtagaaattgggccagaaagactctgattcctgccctcaccagctgagaagggcatgaaggctggactcttcttgaaggactgattggcatccaaaaaatgctcggggttgaactcctggggcgtcaggaactggctggggtcgtagtggacggtgttaaggagggtgatgacatcggtgccctgtgtgggtgaggaggtggacttagcagtgtaggagggctgggaggctcccaaactcctttccattgtattgggctgggtgtcctggggacttgataaggggtgggtataggtgggtataggactcaatcgggggccaaggaaatatgtgtgggtgtctagggttccaagtgatgggtgctatatgctgtattattggggactttggcagggatgtgggaaacccccaccctttgtgggagcagatgtggggtttctggggaaaaggaggggtccctgagaatagcgtttaggcccagggatcctccagatgaagttccacaccccagggcttccagggaggggttctaggaaggggatttgtcacggtgaaggggtctagtccagtatgatatgagatggggtcctggcaaaggcctgagcttctggatttaagggtctgagatgtctgtagctagggcttgggatgccagttgctaaggcctggggtgttgattgctagtgcctgggatactgcttgcgagctgcaagagcctgggatgcctcctcttaggttgcctgatgtcgtttgccaggcctagcgcaccttgggtatcaggaagccgtgaaaggccgtgtccctagtgatgcggtgcggcaagttcatggggatgatgtctgcaaagcgctgcacctcgtggatcaccatgtctgtgtaaggcatggccgcgcggtccttcagcgctggcagccgcacgtgtcccaccacaaggttgatctcctcctgcacgtgggctggaggggaagggggaagtggggtggagggtatcaaaccaggctgggaagaggtgtgtccgtatgtggggaggggtctagtcaaagcctcccagcgctgggcgccactgctggggcgtatgtgagaattagctagagctggccgggcgcggtggctcatgcctataatcccagcacttgggaggctgaggtggatggatcacttgagcccgggagtttgagactgtagggaaaagaaagagagatcagactgttactgtgtctatgtagaaaaggaagacatacgaaactccattttgatctgtactaagaaaattactttgccttgagatgctgttaatctgtaactttagccccaaccctgtgctcagaaacacgtgctgtatggaatcaaggtttaagggatctagggctgtgcaggttgtgccttgttaacaatatgtttacaggcagtatgcttggtaaatgtcatcgccattctccattcttgggcacagtgtactgcggaaagctgcagggacctctgcccaagaaagcctgggtattgtccaaggtttcctccaactgagacagcctgagatatggccttgtgggaagggaaagacctgaccatcccccagcctgacaccagtaaatggcctgtgctgaggaggattagtaaaagaggaaggcctcttgcggttgagataagaggaaggcctccatcccttgcatgtccctggtaatggaatgtctcagtgtaaaacccgatcatacattccttctgttctgagataggagaaaaccaccctgtggctggaggtgagctatgctggtggcaatgctgctctgttactctttgctacactgagatatttgggtggagagaagcataaatctggcctacctacacatctgggcacagtaccttcccttggacttatttgtaacctggattcctttgctcacatgttttcctgctgaccttctccccactatcaccctgttctcctgccgcattcccctagccgagatagtgaaaatagtaatcaataaatactgagggaactcagagactggggctagtgcagttcctccgtatgctgagcactggtcccctgggcccgctgttctttctctatactttgtctctgtgccttatttcttttctcagtctcttgtcccacctgatgagaaatacccacaggtgtgaaggggctggcccccttcagagaccagcctgggcaacatggtgaaactccatctctaaaacaaaatagaaaaattagctgggcatggtggcgcacacctatggtcccagctactcaggaggctgaggcaggagaattgcttgaacctgggaggcggtggttgcagtgagccgggattgggccactgcactccagcctgggtgacagagcgagactccatctcaaaaaaaaaaaaaaggaaaaaaaaaaaagagttagccagggcctgggaggaagtgggtcagtgagggcgaaaggttggcttgtgcaagggcctgggcgttgggttgtgtgggtggggcttcagggagggaggcctggaatccaggacctgatgggatttcaggagcagtttcgggaccctacttgctggacggtggatcgagtgggtggactgtgtgggagggctggagatcagaggcagagcaggggttatacccagaggtggagcttggggaggtggagtagcagacagagctccgtgtgtgggccaggctgtgtgggaaaggtagggttccctggcaagtgggtggctggggctctggggcagagttctgggaggactgttagctgggctctgaagccagcatgcagtggtggacacggtgggcacaaagcaagactaagcaggtggaggcgggagcggtggctcacacctgtaaccccagcactttgggaggccgaggtgagaggattgcttgagcccaggagttggagaccagccagggcaacacagcaaggctctgtctgtacaaaaaataaaaaattagctgagtgtattgagtgtggtggtgcacgtctgtactctcagctattgataaggcggaggtgggaagatcgcttgagcccgaggtcggggctgcagtgagctgtgattgtgccactgtacgcctgggcgacagagtgactctgtctcaaaaacaaacaaaaaactaagcagagctgggtgcagtggctcacgcctgtaatcccagcactttgggaggccgaggtgggtggatcacttgaggccaggagtttgagaccagcctggccaacttggtgaaaccctgtctctactaaaaatacaaaaattagctggatgtggtggtgtgcacctgtaatcccagctacttgggaggctgaggcaggagaaatgccttggactcagggggcagaagttgcagtgagccaaccgagatcatgccactgcactccagcctgggtgacagagcgagactctgtctccaaaaaacaaaacaaaaacaaaaaaaccaacaattaagcgggtgggatctgggtcgggattcaggcaggctgcgtggacctcgtgggccacgtggtgggattggcctccgtgtgggtttgtgggtttggctgtggaatcctggtgccagcaggaggctatatcagacctgggaggcgggactggaggtggggtcgtggttccctgctctggggtgaggctggaacacatgggcacctccacgctgctgtgtgggtgggcctcaccttgaactttcgggtacttcatgaatgccaggaaggcgtggcgcagcgtggtgcccaccgtctcggtgccgccaaagagcaggttatgtgtggtcatcagcagggtatccatgtggaagtggctcagcgggtcctccttcttctgccgtggtagaggggtggggatatgagccagggatggagaccccttcactctagaccagtacaactgctgctgggggcccattcagtcccagctgggtttaactttctttccctgggagagctggggaacgcagaagggcagggcagggaaaatctcagctgcagggcctacaattaacttcttggatagagcttgaatgacttcttgtttttttaaaaaatacattttatgtatgtatgtatgtatgtatgtgtgtatgtatgtatgtatgtgtgtgtatgtgtgtatgtatgtatgtgtgtatgtatgtctgtatgtgtgtatgtatgtatgtgtgtatgtatgcatgtgtgtatgtgtgtatgtatgtgtatgtgtgtgtatgtatgtgtgcatgtatgtgtgtatgtgtgtatgtatgtatgatgtatgtatgtgtgtatgtgtgtatgtatgtatgtatgtgtgtgtgtatgtatgtgtgtatgtatgtgttgtagagactgggtcttactatattgtccaggctggtctcgaactcctggactcaagcgatcctcctgcctcggcctcccaaagtgctgggataacaagcctgagcaactgccccctccgccctgccccacctcctttgatgacttcttaatgagctgtaagttggcggtggctgcgagtggctcctggctccagcccagctgggccagatgcttcagcttctccagggagaaggtcccccaaccctgccccatctggggtccctgtgggtttgaggcaggggcagcaggagaatttcaggtcagactagaggtgggatttccaggtagggattacctctgccatcttggtgaggaagcagtggatgaagtcccggggagatctggggtctagcgaggcctggtggtcgtggacgctgtgggcgatgaggtctctcaggcacttgaagttctggaagatgcgttggtgcggcccaggcacccagttcaggaggctcgggaagatgtcgtacaactggggaccagacagagtaggagggttttggaggaggacgaagggtgttcaggggcgaatggggtcagtgtggattaggtaggcagggacagggtctcaaagggcagccaggtccggggtgggggttggggctgagggggagtgggaaggaggcagtggcggccataaatgctcagtggaggggagtgggcgtggccgtgtaactctgggtggggtcagatgggagggggcgggccctgggcgggccattcacagccctttccccgcccactgtttcctctccattcctagatcctgcggaccccacaccctgcccctgctggactcagttggctgacctcgccccaggggctgctcatgatttgaaagttgtcattgataaggcggataatggtgagcagacgctcatcatcatagtcgaagcggctgccgaagagcacggaacagataatgttggaccgtgagcgactcagcacaaacgtggggtcaaagggctcgcctgagggtgaagaatggaatgggtcaggaagacgcgatgtgcagcacaccagacctcatgcagcaacaccattaatttgcacaacatccgactcaaccatggcaacgtgtcttacggtgcaaacacgggcacatggtcacaacatgctgcttaacaacaccccaaaagcatctgtcaatgccacagacagcaccgaacccacagcttcctgcagcacatcgacagcaacaacgcccaaccacagaacaggttggcaacacacacacagcacgcgacatagcacaaggcaatcatcaggcatcacggaacacaacaacacagggcaacagaacacccagcaaatacgatcacagtacatgccaacacacgacacgcagtgacctaatagccagcccggaaacatcccaagacacggtaaccacacaccaacacgtaatgccagcataccgctacataatcctgccacacaacacacgctagtacacagcaacccagcagacagcacagaacacacgatgtggcatcacaacacatacagtcaaggcagcagaacaaaggacacactatgcagcaacgcaacaacgttggcagccagcagatgacacaatgcaaaatcacatgcagtgcctgacaactctacaatctcacccagaaatatctcaacacaacacgtagcatctggccgtccaacagctgaacagaccatagtaaatactgaacaacacatttctttctttccttttttcgagatgaaatctcgctccgtcgcccatgctggagtgcggtggcacgatctcagttcactgcaacgtctgcctcccaggttcaagagattctcctgcctcagcctcccaatgagctgagatcacacccggctaatttttttgtatttttagtagagatggggattcaccatgttgtccagactggtctcgaactcctgacctcaagtgatgtgcccaccttggcttcccaaagtgctaagattataggcatgagccaccgcgcctggtctagtttttgtattttttgtagatacagggtttcaccatgtcgcccaggccggtttcgaattcctgagctcaagtgatccaccaccttggcctcccaaagtgctaggattacaggcgtgagccaccatgcccggccaaaacagcatatttcaacacagcacccaggacacaatagcacagcccaaaaaaccagatctggagttagatggacgcggtttgaatcctcgttggtctcttagccttggtgtgacttgggcaaactgacttcctttttccgagcctcagtcttctcatctgtaaaatgggcctgatggcactcctctcatcctggggctactataaggagtcagtgagtgtgtgactgggagtcagtgaagggcctgacccattgcaaggctgttacagatcatggtgttgtggcaggttgtaatgccccccaaaagatgtccaggtccttatccttacaacctgtgaatttgttaccttacatggtaaaaaggaccttgcaggtgggattaagttgaggattttgagatgagaagtttactctagactgtctggctgggcctaatgtaatcacagggatcctttttagagggaggcaggagggactgagtaagaaaagataatgtaggctgggtgtggtgggtcacacctgtaatcccagaatatattgggaggttgaggaaggaggattgcttgagcacaggagtttgagactagcctgggcaacatagcaagactccctctctataaaaagttaaaagaatgagttgaatgtggtggcacatgcctgtaatcccagctacttgagaagctaaggcgggagaatcagttgagctcaggaggtcaaggctgcagtgagccaagaccataccactgcactccagcctgggcaacaagagtgaagcttcatttcaaacaaacaaacaaacaatcaaacaagtaaacaaacagaccccaaactattattttacttctggggcccagaattccaaaatcagcttcactgggataaagtcaaggtgtcagcagggctggtacctcctggagccttgataagaggatccatttcctcgccttttcagcttctggtcgcccctttattcctttgtgcgaagccccttcatccatcttcaaagcacatcactccagtctctgcttccatcctcacattgtctctctctggctcttcctgcactcctctttttttaaaattaatattgccacattattttaaattatgtacaaagacctaacatgtcactcagggaccatttcacccactgctctatttagccgccagtctcttcagcaatggtgagggtttggtgtacacattatttcatcacccaggtaataagcatagcacccgacaggtagtttttcggtcctcaccctcctcccatcttaccctcaagtaggccctgctgtttgttgttcccttttttgtgtcaatgtgtagtcaatgttcagctcccacctataagtgagaacctgtggtgtctggttttctgtccctgcattagttcacttaggatagtggcttccagctccatctatgttgctgcaaaagacattatcttgttcctttttatggctgtgtagtattccatggtgtatatataccacattttctgtctttctccttccttccttccttccttcattccttctctctctctctctttctttctttcagacagagtcttgctctgttgcccaggctggaatgcagtggtgtgatctcatctcactgcaacttctgcctcctgggttcaagtgacttctcctgcctgagcctcccaagtagctgggaatacaggtgcccgctactatgcctggctaatttttttgtatttttagtagagacggggtttcaccatgttggacaggcttggtctcgaactaccgacctcacgtaatccacccaccttggcctcccaaagtgctgggattacaggcgtgagtcaccacgcccagcccacattttctttatccagtctaccactgatgggcatttaggttgattccacatctttgctattgtgaacagtgctgctgtgaacaaaggtgtgcacgtgtcttcatggtagaacgattgatattcctttgtgtatatactcaataatgagattgctgggtcggatggtagttctattttaagtttttttagaaatcaccaaactacttttcacagtggctcttggcttaaatttggaagcagaggtacactccctttacacctgatttttaaatttcttttctccttgatcagataatatgttgacactatccaaaattcaaaagatacaaaatgatggaaagtgaaatttcttcaacccagtttcccttgccaagttgatactaatgttaccagtttccaggttattccatacacaaatatacaaatagtaacttactatatccactgtatctgtcaggttgggttggaattttttttctttttcttttaagaccgtctcactctgtctttcaggctgcagtgcagtagggcaatcttggctcactgcgacctctgcctcccgggctcaagtgattcttgggcctcagcctcctgagtagctgagattacaggtgtgtgccaccacacctggctattttttgtatttttagtagagacagggtcttgccatgttggccaagctggtcttgaattcctggtctcatgatctgcccacctcagcctcccaaagtgttgggattagaggtgtgagctcctggccattgtgctgggtattctatttgccctaccatctccactctccaccatgacctgtcttttagaagggtggcctctataaactgtaccacccatgctcccttcacctctacattaaaaaaatttttgggtttggccaatggaagtttgagagaagagcaatgtcagattattttgcttggctgtgtgatagcaatggttgtattcctctgccagaaaccatgccctcctgctgggggctctcttttacccctatacaatcagtctcggtttcggaaactactccctctcactgcacctttcaacctaaggatgatgatggcgtctccttattgtaagccatagagtgcttcaacgtcttgtagggttctttcacactgccctccactttgtaaaaagtccctccattggccaggcgcggcggctcacacctgtaatcccagcacttttggaggccgaggcgggcggatgacgaggtcaggagatcgagaccttcctggctaacatggtgaaaccctgtctctactaaaaacacaaaaaattagccgggcgtggtggcgggtgcctgtagttccagctactcgggaggctgaggcaggagaatggcctgaacccgggaggcgaagcttgcagtgagctgagatcgcgcaattgcactccagcctgggcgaaacagcgagactccgactcaaaaaaaaaagtccctccattaagcactcatatttttctgctggggttctgatggaccaagtctatcaaatgaatgcatcataatttgtttaaccaatatcttggtgcatatgttggtttcctatttttcattatgtaaacagttctttgatgaatctaggtgattttgcacactttcttgtacatcataggagacattactagaagtggagttaactgaatctgagagtatgttcttttgtaatttagagaaaagcattcacattactctcctctgaagctgtaccaatttatagttccacaaaccgtaactgagagtaaggattgctctgggaggctgaggtggtagtggatactagcctgggccctatagcgagacaccatctatacaaaaacattaaaaaaagttctactactagggtgtgggagaatgcacctgtggtcccagctgcttgggaggctgaggtgggaggattgcctgagccagggggttaaggctgcagtgaattatgattgtgacactgcattccagcctgggtgacagagcaagacactgtctcaaaaagacaaaaaaacccaccccaaacaaccaacaaaattggaggccatgatttcacacccagtgatcctaatagctcaaattttgaattagagactgtggttttaacatctgctaaattccttatgttgaggaatcactgagtcaaaggtttcagcctctttccaagggggagagcacgtggacaattacatctcatgcaggcatttggttttatggactcacgtgcttgttacaaaaccagacacagctttagggcttcttattaccttcccccacccgtccttggtagaagagtcaacaaatgacatctaagctgccaacacatattggaaaatgtttgaaacttgagatctgtggtttattatgaaacaggcagtgccctggagtttgaattttttcccagttggtcttagtaccctgtctgcagattgaggggaaagggcaggaaggggagtaaatgtagttaagagcatagcctcagctgggtgtggtggctcacgcctgtaatcccagcacactgggaggccaaggagggtggatcgcttgaggtcacaagttcaagaccagcttggtcaacatggtgaaacccccatctctactaaaaaatacaaaagttagccaggtgtggtggtaggtgcctataatcctagctactcgggaggttgaggcaggagagtcacttgaacccgggaggcagaggtttcagtgagccgagattgtgccactgcattccagcctgggtgacagagtgagactgtctcaaaaaaaaaaaaaaaaagcatagcctctagagtcaaacagatctgactactacatctgtgctaggtactttcagtggttgaatcttaatgattctgactctgtttgctcacatgtaaaatgtggatgatcatagaacctttatcacagatttgtgaagactgcattgcacactccatgaaaagttatccttagcacagcatcaggcacagggaagctcaacgccttgaaggtgctgtttttatttctaggtccctaagatcttcctcgtcctccttatggctcccccctttattctccatatttgttccttccttgaaagtcaagggtgcaggaagaagatgatatcctggaggccaagcccacacaattaggacatgtggtggacattcacctgttcttagatccactgctgctcttcctctgcttgtctatcacaaggggctgacacctgcacactaattctgtcttgagggagactgtgtaggggaacatggccatttgagttcattaggaaagggttttgaggtcaggacatgggtatctggtgtacatgggagtttggtggcctctattgtaggaggctttggaaatgtgtattgttgggaggtcctgagggaggaagtttgggatgaacatggagattctaggctgtggaggaagatgtaacatggctattggaggattctgggaccttaccttggtaccttggtaccttggtaatgaggacatcttcagctttatttttatgtatttacttttttttgagatggagtctcactctgtcacccaggttcgagtgcagtggcgtgatctcaaaatactaaaaattagctggctgtgttggtgggcacctgtagtcccagctacttgggaagctgaggcaggagaatcgcttgaacctgggaggcagtggttgcagtgagctgagatcacgtggctgcacctcagcctgggtgacagagtgagactctgtctcaaaaaaaaaaaaaatgttcatccctcagctgctcagccggcagtcgttcttttctcagtagctgttttctcctcagctttgtggagtctttccctcagcctgtgcagctctgtattcagccaatgatttgaggccactgtaagcagctctttccctttggagctctttttgtaagcaaaagctcagtttcttacgtaagaaaacccaattccccttgaggaagagaaagagctggagtcctttaaaattaactgcctgtttttctgtggctagggagccttatctctccctttgccaggcattgtgaagactctgtttctctagctgtgcagctgcaaggtcactagacagataatctcaagtcgtaaaatatgccgttccttgaaaagtaagaaatgatgtaatgcatgtctctactgaataagtgtctttgtttctcgcttctgttgtatgcttccccctgcacagatctcttcctgccccagaaatgcttaaaaggtaactggactctttgtttggggctcagtcattttggatgttgatctgactgggccggtgcacctaaataataataagaaatcctcctcaacccctcagtctctctgattcctaaattatctcactgcaaaggcaggagaattgcttgagcccaggagtctgagaccaacctgggcaacatagtgagaccctgtctctacaaaagattaaaaaattagccaggcattgtggcgcatgcctgtggtcccagctactcgggaggctgaggtggaaggattgcttgagcccaagaggtcctggctatggtgagctatgatcacaccactgccttccagcctgagtgacagagcaagaccttgtctcaaaaaaaaaaaaaaaaaaaattgggctgggcatgatgccccaggcctgtaatcccagcactttgggaggctgaggttggtggatcacctgaggtcaggagttcaagaccagcctgtcaaacgtggtgaaaccctgtctctactgaaaaatacaaaaattagccaggtgtggttgtgtgcacctgtagtcccagctactcgggaggctgagacaggggcctaggattaaataaggagttttggcaaaactaggctggaactccaaaacctgctacataagtactcacgagggttgctagttattagtattattactttgttgttatttggctctggtcagatttcaattaacgtcacaataggatttaaacatttcttttattatttttaagattttaggccaggcgcactggttcccagcacgttgggaggccgacgggggtggatcaccagaggtcaggggttggagaccagcgtggccaacacagtgaaaccccttttttactaaaaatacaaaaaaattagctgggcgtggtggcatatgcctgtaaccccagctattcgggaggctgaggccaggagtttgagactagcctggggaaatagtgagaccttgtctctaccaaaacaaaacaaaacaaccaacaacattaggccaggcgtggtggctcacacctgtaatcccagtactttggggggctgaggcgggtggtggattgcctgaggtcaggggtttgagaccagcctgggcaacatagtgaaactctgtctctactaaaatacaaaaattagctgggcatggtggtgggcacctgtaatcccagctacttgggaggctgaggcaggagaatcgcttgaacctgggaggcggaggttgcagtgatccatgatccggccattgcgctccagcctgggtgacgaaagtgaaattccatctcaaaaaaaaaaaaagttagctggatgctggatgtggtggcatgtgcctatagtcagccactcagaaggctgaggtgggaggatcacttgagcctaggagttcaaggctgcagggagccgtgatcataccactgcactccagcctgggcaacacagcagactctgtctcaattaaaaaaaaaaaaagcgcagaagaatattggtttatggagagtattattttaagttttagaaattttctatgcaaaacaaacaatggaaaataagaaatgcattactctataataaaatatagccttttctctcccatatatatatatgagtggataaaaacagtcataacttcctacacatttaatcctctatactaactctcatacccacttaccactccctcaatgacaaacataccaaaaagatgctaaataaatgaaaacaatactttgtattcttaactatgtaaagtattgtacttaacaggtattttcttggctgactggttctccatacccaacaaacacagtgatgtcaactctcaccactcatattaaacaatatagccattgctgtaaagtacaaaagagaaatgcagtacaaattgaaaaggaggaaataaaacttttattcatcgctgatattatcagatacataaaatcccaaggagacaaaagctactactaatgagattagaaggatcccagaaacagacacagacgtgcacacacacctccccacagacacagatacacactcacaacacactcagaagtacattttattttattttgagacagtctcgctgtgtcacccaggctggagtgcagtggctccatctcagctcactgcaacctccgcctcctgggttcaagcgattctcctgcctcagcctccccagtaggtgggattacagatgtgcaccaccatgcccggctaattttttgtatttttagtagagatggagtttcaccatgttggccaggctggttttgaactcctgacctcaagtgatccactcgctttggcttcacaaagtgctaggattacaggtgtgagccaccacacccagccagaagtatcttttaaacaggatttttaaaagtgggagttgaccctttccaaaatctggagttgggatgggcattagtggtttggagaggaaagagcaggtgtgttgtggctgggaggcgattcctttcagcaccttgggtgatgtctgaggccatacccactttctgtgctatttttgggattatgatgattaacccacactccctttgttcctcccatgtaacctggattcttgggcattcaaccaatattaaacccttcctctgaaaaattcctggattgacaagagcacactggacccatttccattccccatcgtgatcaataggtatcaaaagaaatgatagcttcttagaatagaaatttgcagccactggggaatgtagttcttaaatgtgaatacagaagaatctcttattacaaaattctgtatggctctggatttaagattttgttattttttatttttgagacatggtctctctctgtcactcaggctggagtgtggtggcatgatctcggctcactgcagcctctgcctcccaggctgaagcaatcctcccacctcatcctcccacctcatcctcctgaggagctgggaccataggtgcgcacgaccacacccagctatctttttgtatttttatattttgccaagttgcccaggctagtctcgaacttctgagctcaagcaatctacccaccttggcctctcaaagtgtcgggattacaggtgtgagccactgcagacagccaggatttaagattttaagagatattgaaagccttttgttataataccattgaaaacataaaatacttaaaattaacaaaagttgtgcaatagcataactacaaatcattgatgagagaaattaagtatctaaatgaagagatttatcatggccacgaattagaagacttaatattgttaagatgtcagttcttctgaaattgatcaacagattacttgtaatcccaataaaaatttcagcaggctgtttttgttttggtataaattagtaacatgattttaaaattctaagctgtggctgggcaaggtatctcacgcctgtaatcccagcactttgggaggctgaggcgggcagttcaccttaggtcaggagcttgagaccagcctggccaacatggcaaaaccctgtttctactaaaagtacaaaaattagctgggcatggtgttgggcacttgtaatcccagctacttgggaggctgaggcaggagaatcacttgaacccgggaggcagaggttacagtgagccgagttcgtgccactgcactccagcctgggcgacagagcgagactctgtctcaaaaaaaaaaaaaaaaaaaaaattctaggacgtatatcttttacaactactagtcaaagtaattataaaagagtaacaggccgggcgcggtggctcacgcctgtaatcccagcactttgggaggccgaggcgggcggatcacgaggtcaggagatcaagaccatcctggctaacatggtgaaaccccgtctctactaaaaatacaaaaaattagctgggtgtggtggcgggcgcctgtagtcccagctactccggaggctgaggcaggagaatggcgtgaacccgggagacggagcttgcagtgagcggagattgtgccactgcactccagcctgggcgacagagcaagactccatctcaaaaaaaaaaaaaaaaaaaaaaaagagtaacgaattcagagggctcaccttattttacaataaagtagtgtaggcatatactgatcaatgaaacagaaaagaaggtctagaaacagacacttatataatcaactgatttttgattaaggtgccaaagctattcaatgggagaaaggaaagtcttttaacgaaagtgttggaataactgaatttccttaaggaaaaaatatgcttttgctcttatttcacgctatatttaaaaattaactcataatgactcagacttaaaagtaaaagctataactatgaattcttcaaaagaaagcataggagaaaatctttgtgaacttggggtagacaaagatttttaaaatggaaaaatcgatcatagttctttatttggaaattaaaataaaaatgccataagcaatgacacaaaaaatggcatacctagcattacatttggcttacatttagtgtaagatctacacagtaaaacccgctaaacattgctgtgtcatgttgaggaattttttccttccttcccttccttccttcctccctccctctttcttttcttttctcttttctctttctttctttcctttctttctttcttttcttccttcctttctttctttttctttctttcctttctttctttccttcctttctccatctcttcctcctttcctccctccctcccttttattttccttccttccttccttccttctccctctctttttttttttttttaagacagagtctccctctgtcatttaggctggagtgcagtggcacgatcacagctcactgcagccttgtcctcccaggctcaagccatcctcccaccttagccttccaagtagctgggactacaggtgcacatcaccatgcccagccaatttttgtattttttgtaaagacagggtttcaccattttgccaaggctggtcttgaactcctgagctcaagcggtcctgcctgccttggcctcccaaagtgctgggattacaggtgtgagccaccgcacctggccaatcttttctttttctttcatgaaagttgtactatttatggagtacatgtgatgttttgacacatagacaaaatgtgtaataatcgaatcaaagaaattcggatatccataacttcaggcatttatcatttctctgtattaggcacattccaattccactctcagttattttgaaatatactataaatcattgttaactacattcaccctattgtgctaccaaacactagatcttattctttccatataactgtatttttgtacccattaaccatctcctttttatcctcccttctccactaccctttttagcttctgctaaccatcattatacctctacctccatgagttcaattttttttagctgtcccatagtagtgagaacatgtggcctttgtcttcctgtgcctggcttgtttcacttaatgtaatgtcctccagttgcaactgtgttgtaaatgcaggatctcattcatttttatgactgaatagtactcctttttgtgaattttctttatccattctatccacattttctttatccattcatctgttgatggacagtcaggttatttccaaatcttggctactgtgaatagtgctgcagtaaacataggagtgtggatatatcttggatatactgatgtcttttctttggatatatacggtgggattgctggatcatagggtcattttatttttagtgttttggggaacctccaaactgttttccatagtggttgtactgatttagatttccaccaagagatatgtatgagagttcccttttctccacattcttgccagcatttgttattgcctgtcttttggataaaagccatttgaactagggtgagatgacatcttattgtagttttgatttgcatttctctgatgataattatgttgagcactgatatggtttggatctgtgtccccaccaaatctcatgttgaattgtagctcccaatgttggaggtggggtctgctggagggtggttggatttctcatgaatagtttcatactgtcctcttggtgctgttcttgtgatagtgagttctcatgagatttggttattcaaaagcgtacagcacctccccgctcactctctcttgctcctgcttccgccgtctaagatgccttactccctctttgctttctgccatgattggcagtttcttgaggcctctccagaagcagaagctgctgtgcttcctgtacagcctacaaaactgtaagccaattaaaactcttttctttataaattacccagtctcaggtatttctttatagcagcgtgagaatggattaatacaagtctcaggtatttcttttcttttttttgagatggagtctcactgtgtcgcccaggctggagtgcagtggtgtgatcttggctcactacaacctctgcctcccaggttcaagcaattctcatgcctcagcctcccaggtagctgggactacaggtgcccagcaccacgcctgactaactttttttgtatttttagtagagacagggtttcaccatgttggccaggctggtttggaactcctgacctcaggcgatctgcccgctttggcctcccacagtgctggggttacaggcatgagccaccgtgccatcaggtatttctttatagcagtgtgagaacggattaatactagcaccttttcatatacctgtttgccatttgtatgtcttcttttgagaaatgtctattcaaatcttttattaattttaaattggattattagatttttttcctattgagttgtttgagctccttatatttttttgtgaattattctttgtcagatggaaaacttgcagatatttattttcttccactctgtaggttgtctcttcactttgttgattgtttcctttgctgtgtagaagcgttttaacttgatgtgatcccatttgtccatttttgctttggttccctgtgcttgttgggtattactcgagaaatctttacccagtgcaatgtcctggagagctttctcagtgttttctttagtagtttcatgtttgaggtcatagatttaagtctatgatccattttgatttgatttttgcatatgtcaaaaaataggggtctagtttcattcttctgcatatagatgtccagttttcttggcattgtttattgaagtgactgttatttccccagtgtatgaatgttcttggcacctttgttgaaattgaattcactgtagatgtatgaagttgtttttgggctctttattatgttccatcggtctacgtaacttgttatgctagtaccttgttgttttggttactatagctctataatacgatttgaagtcagataatgggattcctccaattttgttctttttgcttaggatagctttggctactctagatcttttgtggttctgtttaaattttagaattgttttttctgtttctgtgaagaatgtcattggtattttgataggaattgcattgaatctgtagattgctttgagtagtatgaacattttaacaatattgcttcttctaatctcactgtgtcgcccaggctggagtgcagtggctccatctcagctcgctgcaacctctgccttatgggttcaggcaattctcccacctcagcctcccaagtggctgcaactgcaggcgcatgccaccgtgcccggctaatttttgtatttttagtagagatggggtttcaccatgttggccaggctggtctcgaattcctgacctcaagtgatctgcccacctcggcctcccatagtgctataattaacagtatgagccatcaagccctgccgtatttcattgtatgaacatattacagttcatttatccattcacttgttgaagaacatcttggttgcttacaagatttggcaattatgaataaagctgctataaacatctgtgcagaggtttttgtgttgctatatgttttcaactcatttgggttaataccgaagaacatgattgctgtagcacatggtaagaatatgtttagctttgcaagaaaccgccaaattgtctttcaaagtagctgtgtcattttgcattcccaccatcaatgaatgacagttcctgttgagccacctccttgtcagcatttgatgttgtcagctttggattttagccattctaataggtgagtagtggtacatcattattgtttcaatttgaaatggctactgacatatgatatggagcatctttccttatgcttatttgctatgtgtatattttctttggtgaggtgtctgctcagatcgtttgcccattctttaattgggttgttttctattgagttttaacagttctttgtgtattttgaatgtaagtcccttatcaggtatgtcccctgcaaatatgttctcctagtctgtagcttgtattgtcattctcttgacaattcttttgcagagcagaagcttctaattttaatgacacagaacttatcaattgcttctttcaaggattgtgcttttggtgttgtatctaataagccatcaccaaacttaaggtcatctagattttctcctacattatcttctagaagttttgtactcactattcatttaggtctacaataaacttggagttaattttcgtgaaagccgtaagggagcttctaagggggacacacactaacttctttgagagtgggcagtgattgtgaaactctcagctgggtcttacaacagaccccagatccatcaggagagcccagccttcagaacccatagtggaatatgtttcatgcatacacggaggagaatatgcagtcatatgctcacatgcatgtctgaacatgatcacacacatgaatatggctatgtcctgatccagagttctctcattctctgtaagtgattctttccttcaacttcttcattaagggatatattgacagaatgtcattaaaattaaaaacttctgctctgcaaaaaattgttaatggactgactctgtatgtccattcatgtctcgttgtgtccctggactgactctgaatgggctacagtggccttatctggtagcaagcacagattacacccgggtattcaaagcatgttgagtaggtgagagtgtgggcatgtgtgcagtgaaggcaggacagccacccgccaggtctctggaaaactccccaggacagggatgttcaggccatgtgatgctatactaagctgttttacgtgaggaataggtgctttttaagaatctgtctagaaggctatgggcacagatctgtgttcaaagattttctgggcacttatgttttgtgagacatcagagacaactttctaagcctcagttttgtcacgtgtaaaatgggcatgaacgcccttcgcagaggtttgtggcaattaggtgagcgtgcaatggtttttgaacaaaggtgacacgggggtacgtgctcaggaaataagagctgctattattactactcttcatagcataatgtaagggtttccttcctctcatcccagctcggaagcaccttatcaaggtgaactgagccgcttctgtttcttctcttccctctagccaccacgccccttcctttccgccatcctgcccccagtcttagctgcgcccctctcccaagcccggtcttggccctgccctttccctggccccgcccaccagacctgcaccggcacagccctcgctcagcggggcaggaagctcatggtgtagtttcgtgggatcgtggcaaagcccacgtgtttgggggacacgtcaatgtccttaggtgactgggaggacttgaggcggaagttctgcatgacggtggtgaagaagagaaagagctccattctggccaggccttctccgaaacagttccgctttcctgaggaggagaggcgggaggggtggaggtgaagcccactctcagtgcagcctcgccccagtaccgacctccagctgcggctctcccagggaggaagggtggaatattatggcctgagagagtttcagaggaggctctgatcctccctgagcctcaatttctttctataagagatgtaacaatggtgaaccaatattgatatattattactaacaaagtccatagtttacattagggtttactctgtgttatacagttctatgggttttgaaaaaggcataatgtcacacatccatcatagatggggtgatccatgccaggtgtagcaatgggaggtttagatgtcctttcctgccaggtacacttgcaaatatgactgctgtgccgtcatctcctttttagggatctgaggaatctgctgtgtgaccctagagaaatacatctacggggaaagatgtttcctttcattttacctgggcgcaggtactgggtgcttggtagttaaggaagtatcagctgctggctcaagggtagattctaacaggaacttccaagctggagaaataccaggctacaccgcagagaggggaggagggtgagggaggcccctgctggtgtgagccgtggcctggcagcaaacagtggtctcttaccgatggaaaagggcacaaaagcatcactcttcttaaactgccccttctcattcaggaagtgctggggattgaagtcctgggggttggagaagaaactggggtctctcagcacagagcccagcatagggtacacttcggtgccctggtagggaggaggaagttgtgtgtgatgaggagggtcgggggattggtgaaagtacacaggggctggagggggaactagtgtgccccaggtaaggggaagtggcaggcatggaggagttggggtcctctgatggaggagctttgggggatagaaggttcacatctctgaaacaggaagtttgggagacatggggtccatgtccttctaggcaggagtttgggggacctgagatttctgtccctatgacaaaaggccgaatggaaagggggcttctgtttcttaagataggaagtttgggaacatgtgtttgattctcctgacacaaagagtctggagagatgcaggactcaggagtgtctaagtggaaaggtggaacggatgtggtggttggggaagtcttttttgactgattgagggagtgggacagggtctagaaagcttctaatgtgggtgggatgctggggacacagagaggggctggaagtccccgtagtctggggggtgggggcggatagcaccttagggaggaagaaatcccgaaacttggtgtcctttttgactctgcgggccaaactcatggggatcacgtctccaaatctttggatctcgtggatcactgcctccatgtagggcatcttggcccggtcctcaaacttgggctgccggttcttgccgatcactctgtcaatctcctcatggaccttggctgggggaggagggggaatgtgtttaggtatctaggggtctcagagcaggaaatgatagtccgaataggcaaaatggggtggatgatatggctccgcctatgagacggaagtagagcattcataacagaacagacatcagccattcgcattgttggagtaggatcctgttaaccaggttgtgccagaatcacaggggaggcacagggaggaacttaggggatgacccggtggaacgggcagtgggcactcagtgggcttgggacagaagtgactgaccaatcagtgcagacattttcaatattttaatatctaatgagactcagctgatgcctaccagctgaatgttgccctgtctctggacagcaagtcacgtctcagggtcccgggatctgggacaggtggggacattgcaccagtcgaaggggaattttgagggtctggggccctccacttccgtccccctccagccttaccctccacctctgggtgcttcatgagcagcaagaagccatagcgcagggtggtgctgacggtctcggtgcccccaatgaagaggttcaacgtggtcatcaccaggtttttcaagtagaactccgtgttggggttcttctcctcctgcagggagagggggctttaggccaacctcactcctcttgccctcagggcccttctagggcttttcctttggatctacctctctttggttcagaccaaaggtggaaagagggaccctagatctaccagactcgctctaggttccagcccttgccctggctgctggctttgcccaaaatgctcttccttctcaccttctttaccttgctgaccatctgtccttcaattatcaacttagctgtcagtttttttttgtttttttttttcttatactgacttggtcttgctaagttgcacaggccggactccaactcctgagctcaagcaatcctccagcctcagcctcctgagtagctggaactgcacatgcgcatgaccatgcaggctcacttactttttaaacaattaattaattttttttgacacagggcctcattctgtcacccagactggagtgcaatgccgtgatcttggctcattgcaacctctgccccccttcgcgccaccatgcccaactaatttttggatttttagtagagacggggtttgaccatgttggccaggctggtctcgaactcctgacctcaggtgatccacctgcctcggcctcccaaagtgctgggattacaggctgttagccacggcacccagccaattgtgaggattattatgatgagggttaatttgaatgggcctgtgtcatctgcctgccccactcccagactgatttccctctgcctggctttgcatctccccgcagtggctgctggggtgtacctcctgcatgcggatgagaaaggagtcaatgaagtcccgtggggaattgggatccagcgtgcgctggttgtgctccaccttcttggctatgaagtcctccagcccttgcagcaactgaaaggcctgttgctgtggtcctggcaggtgtttcatcaccgaagagaacatctcatagagctggggttgcagagagaggatgggaagggaaggacagctgtcacggggcaggagctgatgggaatgggatttgtttcatagcaaggaaggaactgagttaaaggcatctgtctcgttgtttaggtatttcagtggggccggataggaacttatatctaagttttcaggaaggttaggtaccagggccacggtctagtaatttaggtgagaagaactgagacatatatccaggtttcaggtatttaaacgaggctggattggagcacacatctaggtgttcagatattcaagtgaagttgagttggaagacacctgtccaggtgtttagctcttcaggtggggctggtatgaggtgagtgtcacctgtctaggtatttaggcattcaagtaggcttggttggagacagctgtccagatacttactgggtctggattgggggcttttgttcaggtgctcaggtattaaagtggggctggtgaagatgttgaagtggaggggatacctgttgaggtgtttacctatccaagtgggatgcactgggagcacctctgtaaggtgtgtgattggaaagggttggggaacacttatttgtgtgtcagggaacaatctgtctagatatttatgtgtttaaggtgttggttagggcagctgtccatgttttcaggtatttaagtgggtgaagtagagggcgcttggccagatattccagtgggctaatctgggacatttgtgtagatgtgaaatgattatgatgggctggattttgcagcaccaggtgttcaggtatgcaggaggccggttgacgcagtcacttgtccaggtgttaaaatattcagaagaactgggtagggagcatctgttagaaattacggtaagttggggatgggaacacgtgcccaggtgagagagctgagctgagggtatgcatcctgccagcaggctctgttttggggagcatctgttgagctatccaggtgtccttggagacagggtattggacatccatcctgggttctggtgcaactgtccagttgtccaatatcggggactgattttgaggggacactgtctggagggcggtgggagtttggggcacctgtctccaggtaggggagcagttggcaggttgtggtaggggcgtcacgggccgggctgcagccagttacctgccccgtggaggttgacgtgaactggaagattcctagcatcatgcgcaacagtgacaggaactctttgtccttatagtcaaagcggtccccaaagacaatggagctgatgacattggagactgtgcggctcaggaagaaggtgggatcgatattggcgcctgcgggtatggcgggagaagggggttggggagagagtcaactcagaggtctgaggagagtcagaattccaggaggcagggccttgttgagccaaattcccagcgccagactccagggctggaagtgcgggcgcctttccccacctagtccccatccccaggcagaacgcgcgcgggttcctcgtcctgggtgttttccttctcctgcccccgcactcggggtcccctgctcaccgccagtgccccggagggcgtcgatgaggaagcccgcctcctcctggatgcgctcctcgatgcctcgcttgcccaccccgaagtcccgcagggtggcgatggagaagcgccggagctgcttggcgcgctccccgttgctgaataccacgcctggggaggtgaacgcgggaatggagacaggccagggggcggcaggggcaggagcggagcagctccaaggggctccccaagggtggaggagagagggagtagggtgggagagagatggattcagcgccattgcccagcagagctgcaaactcagtcagagaaacacgatgtcgaggtagagagagagagagagagagagagagagagagagagaagagagagaggagagagagagagagagagagagaagagagagaggagagagagagagaagagagagaggagagagagagagagagagagagagagagagagagagagagagaccaggtttaaagaataagacaatcagaaaagaaacagaaaggccagacagagagatgcacatagaaacagagggataaggggacactccatggaggaagggaaggaagtggggagagaaagagagtgatggaggaagaggatggagggaggggaagtgagatatggggagatctgggaggaggaaataaaaatggtgaaagattcttaagctgagctggagaagagagaaaaatattgagatagaaacagagagggtctggaaggaagagagactgttaccaggagatggaggctgaagatgtggaagtaggaataccctgaaatcctaagacagaggaagaagtgagaaagggatgcggagagatgagaaacacagagaagcccagaagctaagagggacaaaaagacaaatgaagacagagaaccagggctggaaaacagaaacccaggatgtccttagagatggagagagaggggaaagaggagactccagtgagagagaataaggaggtggggcagagagaggcagggaggaatcaggacagggacgctggagacaggtgagggatacacatggagaggccacaatgaagggagatggggagggaagaccagactggggactctgccttagcctccagttggcaggagagtcagggagaaggctgggaacactgagaccttcgtgtccacctggccaccttccccctcttgggcaccccctcaccatagcctttgaagacccagtcgaaggtggcttgctcgcctcgcccgctgaactcctcagcctggtccaccagagcctccctgacggcatcatgtccacacagcaccacgacccgccggggccccaagtgaatggtgaacacggggccatagcgctcactgatctgatggaggtgggtgggagtggttagagggagaagcctccactctgaatggggcccagcaccgagatgtcatgtgctgggatgcttcgcacccaggttctcacagtcagggagctggacatcccaagatcctgtctttctgatgctgaaactccaaaactccatttcctaagactctggtccacactggtcaaccccctgccacaaagccccagccaactaggcagcccccaccccgtgccacccatctccctgccttgggacaccttcatgagggagttgtacatctgctctgtgttcagctgcaggtagtttccaatgaagggcaatggggtgggtcccggaggcagcttccccttgctcttcctctgctgccaaacagacatcaagaccattacagtcaggcagaccagcaaggccaccagaagcatccctgaggccagcatggtggtagtgggatgatagatggtgacggctggggtggtttgcctttatactgcctgaaaaagagggatggactttggctgattacataattacctcatttcacctcccaactacatgccccaccatgaatcctgcctagcttgggacacagccagcaagggaggataaggggaccccagggcagctgaacagagagggggcctccagactaaatctgtggtacttcaggaggggtgccgcagggctgtggatttaggagggggcaacagataagctgtagaactgaggagtttggaatatttgcataggggagcacttgggctttggatttggggtctgagagtgagaatgcaccccaaagttgtggatctgggggttccaggggagaggaatccaaaggtctgggttttattagggtaagacaaagtgtggctgtgcatttaggggtcttctgttgtggaggatgcagggttaagggtctcaggaagggggattccaggcatatggacttgaaagtctcggggctaggaagacccagggctgtgggtgtggagtttctgggaggaggagtgtgtagcaagcccagcgggttctcccagaaagcccagcagcccagcactgggtccaggggctgacttgattttgcttttgcccagagctgtctcttgatgcccagaatcctcattggaacctcagagtgaggccaggatgggtgccatagaacctccactgcccatctctgattgggaaggggaggaagaccagagccatatttcaggggaactttccccacacctggagaagagtacctggagttagcggttggcagagggattggctaggtctggagaaatagtaataacaacccccaaatggtggaaaaatctcaagtgtcccaagggttgtccgctggtttccaacccagatcctcagggaaacccactagattgattgtatcatccctattaatattatgattgttgtttatgtttctcattttatataaagatctacagaggacagaaaacagacagtgggcaggggacatgtgtgagtggccctgaactcccatctctcctgctctgtgtacttagttcccctttctggatttggttttcctgccagtggaaagggagtgtttgggaagagaagatcacattcgagggtgagttaagtctcctttaagaatgattcctgctttgtcaggggctactactattagcaggcagagggaacagtggcagaagagattggggtaaactccagtattaggcacagaggcagatcctggggtgggtgtgagtggagaagggatgagtagccctcctgtccttccctcagggaaattcttccttagtaaacaggacagttaccctttggtgagcatggtcgtatacgggaagattaagtctaggtgtgtatgatctggttgaatctttgtaacaatgaggttggttcatcatgatcatcctcattttgaagatgagcagatctagactccataaatcctcttgagtgaggtcacacagggagtaagtgagggagctgggatgtgaactttctcctcaccccccttcattgactggcctagatcaccctgggagtcaagtgcaggccagccttagcaggaggtgagtgctgggactggcatcagcagtggacacactgatgacattggtgggttctgatatcagcatcaggtatggccagggagggaaaggcatcgtgttggctttgggactgcccccaggtgtatgcgaggatgggaaacaagttggcactgaacttgacaccaggagaatattgaagtcatgtttggtgccaagagggctctgtgtgttgtctcaggtgtcattgagggcataagagtgtcctgcttcaggagggcgtaagggtggcaccatatagggtctgaggttggtcccagtgggctgtgacatgagcatgaggcaggtgctgatattggtcctatgtgggtctgagatgagcctcagccagaccctgagaggggccccagatggccacaggacaggctgtggtggttggaccatttagggttgcacctgtcctctgggtcaccaactttggacaagtggaggtgggtgaggttggcacccccaggactgacatcttgctcaaactgttctaggatgctgagctctgagacctgtgtggagggaacaaaggtcagagaacaaggcagagagaggaaagttgtttgttgattttggaggggaagaggtgggaaggaagattagcaccagcttggcagatatcaatcgctctaatcctgttcaccagtctgcacctgggcctggctcctccttttccttcgtgtttcttaaaaaggtgggagacagaaatctggggagtttgtttctcactggggttggcactaggaagtgcactgagtgatcagcaggttgccatgacctggccagggaggggatggggagagacaggttgggagaactctagtatttgtggacatagaggtcaatgaattttggacttgttgattaccctagagcatggagtgagagaatggtgtctgaaatcatgtgggagggacttgtcccagtgggcagtgtcttgggaacaggctttcagagtgagttagtggcgagcccaggaagatccctttcctttgctgggcctcagtttccctttctgaatggatggtgcaatgattaaggcctggattggaatcctaaccttatcctttctttgttgtgtggctttgaacagctgacttcatctctctgagtcttatggagccaagaacagctcctacctctttggctatttaggggagaagtataagtgttaatgcagatgaggtacatggcagtaagtgctcaatgaatggtagttgttctctttaatctgtaggatgaagcggatggatgagatgttccctaagcacattccttgcttttacattctctagtctaaagctcacaaatcttttcctttgggaaggaggaaagggacagagtctttgggaacctccttcgccatcccttcctcagcacagccaagctttaccccatggagctgtgaataggaaattaatccttcatggcctcctggagtgtggtgctgagttaggcagtatctgcggaaggacaggccagcattagactctcaggttattctggttggccctggagccctgcacaggactttgcccacctgtctgtctatgcttgtcttggatcccatctttctatctttctctttctccttccctgcaagtcagtgttcccctcaatcaccctgtgtgctcatgcatctttgtgttttgtgccattttgtccagtgggttctcctggatgcctctgccatgtttatcctcatttatacaactgtgtgtgtgtcattctgggtgcatgcttttagtgtctacgtgtatgtatgtttcagcatgttcatgttgatacatgaatttatgtgtgcaccaggctttgtggtgtgtatgtttgtgcttgataatgggtatccattccaacttatgtctgcacatgcacatgtgtgtgtgtgcctgacagggtgtggcactgtttctcaatgcttgccaatctttgtgtctgtctctgcatacagcatgtgtgcacacatgatttaggggtgtctacgatgtgtatttctgtgtagaacaagatgaatgctgcatattcatatttgtgtgtatacattcacaattgggtgactacatataagtatgtggatgtttttttctttgtttttttttttgagacagagtcttgctctgtccccacgctggggggcagtggcatggtctcggctggaacctctgcctcccaggtttacaccattcatctgcctcagcctgctgagtggctggggctacaggtgcctgccaccatgcccggctaattttttgtatttttagtagagatggggtttcaccatgttagccaggatggtctcgatctcctgacctcatgatccgcccgcctcggactcccaaagtgctgggattacaggtgtgagccaccgtgcccggccagtacgtggatgttttcatgtgttcattctggtgtgtgtgtgcagacttgtgggccatgttgcatacacgtgaacatgtgatattttcctgtgctcatctgtgtttggattaaaacagtcctatcccagctccatttatctgcttgaaaaaacccccagaactgcaggaagctttttatgagcataatcttaattgaactcctgattgcaagactgaggttagctttatcatctccattttgcaaatgagttagataagttcccccaaagccggtcataagtgacttgcttctgcatttcacagctaatgagtgtagagtcttagtatggtcttgtgtgatggtaaattttttttttttgagatggagtttcgctcttttgctcttgttgcccaggctcgagtgcaatggtgcgatcttggctcactgcaacctctgcctcctgggttcaagtgattctccagcctcagcctcccgagtagctgggattatagccaccagacacagctcatttttctatttttagtagacacggggttcaccatatttgtcaggctggtttcaaactcctgacctcaggtgatctgcccacttcggcctcccaaagtgctgggattacaggcatgagctaccacgcctggctgtgaatgtaagtttcatgctgttaatcaccactttggactgctaggccccacctgtttttctttatgaaacattagaaaaactgcttgtactcccttgtatttcttcaaatacttccgtgtaaacatgtaacaaaagatttcaaaatgttagaaaaaaaaagtcttttaataggagggagacttgaccttctatagtgtttgcactctttggaaccttaagcaaagacctagttggccagtatagccctcatgccattggcaatgaagcagtgggggagttggggtattagtggttgtggtcagagagtgaaatgtctgtgtttcacatttcagattgatgacaaggatttggggggtggggctgtgggaatgttggctgaaaatagagtgaagaaggtcaaagaagagaagacagtcaagattctttttttctgagtgtttggatagctcacatccatggccatgaagttcctccctaccaggaaaatggcaggacttagagttcagagatgggacatttagtaaatagtgctacaataaacatgaaagtgcctcaacatactaattttttttttgaggcagagtctcactctgttgcccaggctggagtgcagtggtgcgatctcagctcactgcaacctctgcctctcgggttcaagcaattctcctgcctcagcctcccaagtagctgggactatagacgtgcaccaccatgctgggctaatgtttgtatttttagtagagacagggtttcattatgttggccaggctggtcttgaactcctgaccttaagtgatccgcccatttggcctcgcaaagtgctgggattacaggtgtgaaccactgtgcccggccagctacacactaccagatctcacgagaactcactatcatgagaatggcaagggggacatctgccccctgattcaatcgtctctcaccaggcctctcttccaatattcgggattacaattcaacatgagattggggtagggacacagacccaaactatatcaccttctctgtggtaggttatattgttttatatttttatttttttgagacaaggtcttgcttcatcgccaggctgcagtgcagtggcatgatcatgggtcactgtagccttgacttcctgaggctcaaatgatcctcttatcctcttatctcagtctcccaagaagcatgccaccatgcatagcacattaaaaaatttttcttgtagagagaggtctccttatgttgcccaggctgatcttgaactcctgggatcaagtgattctcctgcctcatcctcccaaagtgctaagattttagacatgagccaccccacccagtgattatattgttttatttatttatttatttattgagacagaatcttgctctgttgcccagactggagtgcagtggtgtgatctcggctcacagcgacctccacctcccaggttcaagtgatacgcctgccttctgctgctgaatagctgggactacaggcgcccaccatcacgcccatctaacttttgtatttttagtagagatggggtttttcgccttgttggccaggctgctctcaaactcctgacctcaagtgttctccccaccttggcctctcaaagtgctgggattacaggggtgagccaccacgcccagcttatattgtgttgaaaatgttttcttctctcccactggtcctttccttaggtaagaattacactttcctctaccccatggacaggcttggctgtctacttgctttggccatgactcctatcaactctttttctttttttttttttttagacagagtttcgctgttgtcgcccagcctggagtgcaatggtgcaatctcggctcgctgcaacctccacctcctggattcaagccattcttctgcctgagcctcccaagtaactgggattacaggcacacgccacaacgcctggctaattttctttgtatttttagatggggtttcactgtgttggtcaggctggtctcgaactcctgacctcaggtgatctgcccgcctcggcctcccaaagtgctgggatgacaggcgtgagccaccgtgcccggccaactctgttttgttttttttttttttttgagaaggagtctcgttctgtcgcccatgctggagtgcagtggcgagatctcagttcactgcaacctccgcctccagggttcaattgattctcatgcctcagcctcctgagtagctgggattacaggcacatgccaccatgcctggctaattttgtatgtatatgtgtgtgtatatatatatatatacacatatacctgtatattcagtagacacggggttttactatattggccaggctagtcttgaactcctgacctcaactgatatgccggcctcggcctcccaaaatgctgggattacagacatgagccactgcttccagcctaactctgttttataccaaaggtctcactgggctccagtaactacttcctccatttccactctcagggatggggtggcaatggagccccactgttatgggcttccaggatttcccttaatgctgccctcaactttgtaaatagtcctatcattaaactctcaattatcctgtttgtgtatgacttatcattcctgctgggatcctaacccacacagcacttcattgtatggatgaaccatttatttagccagttctttaatgatgaacatttaggtcatttccaatctttcactattaaataaaactgcagtaaataaacttgtatataggtgatttttcacatagtcaaatacaactacaggataaattattatatatggagttgctgaatcaaataatgctgtttaaaaataattttgactgatattgtcaaatcatgtatagaggtgtacagccctattagcagaggataaggatggggacttttcctttggagcaagcccagaatcctgaatgttccaacagctgaagatgaggactgctaagagaactcaaggtaaagaacattagatttctggcaaataggtgtaggtgggtatcttgagtaattcattgaataaatgaagtgtgtaactgtgtttgttccccatcttggaatttttaaaaattattgcttttagatggagtctcactctgtcacccaggctgtagtgcagtggtgagatctcgcctcactgcaacctccacctcccaagttcatgcaattcttgagcctcagcttctccagtaggtgggactacagacacacaccaccacacctggttaatttcttttgtatttttagtagaaacggggttttaccattttggcgaggctggtcccgaactcctgacctcaagtgatctaccagccttggtctccccaggtgctgggattatagatgtgagccaccgtacccagaggatattgttgattataattgttacagaagttttcgaaggtttgtattagaaaatgttaagtctcagaggactgtcttagttcattttgtgttgctataacataataccagagactaggtaatttacacagaaaagagacttatttggcttatgattctggtgactggaaagtccagagcataatgccagtgtctgcttggcttctgtgatggctttcatgctgtatcataacatggcatgaggtcgaaggggaagtagacatttgtgaagggtcaacacatgagcggtgtcctcaatttataacagtctgcccttgaaggaatgaatccattcccatgagaacgaatcctgttttgcaaaatgagacctcactcactaccttgagaaaggcaacaagccacccacgagggtggagctcatgtgacctatgtgcctcccatcaggcctcacctcttaaaggtttcacctcccagcattaccgaaccgggaattcaggggttccagcatgaattttgacaggaacactcaaactatagcagaaactatgaccctacagatagtgattgtaatatttcaagtctttggtatagagactgtaatttccaagatttcatgaatctttctttcatacatggaaggctgggtaagtcaaagattttcaaagattttcagcctcctcccaagagacagtacccatgcatggttagggtctgaatgagcaattgttattcaattgtttgttatgaaatatgacatgtggcttttgggtttcttgctactctcttatgcctcccctcagtcagtgggaagcagcccaaactggaattgaagctgtcaacacaaacctgaaaatgttcagaacttgataactatagtataattataaatcgcacagggccctggtagttaaatcacttcacacttgactttatttgcctgtctgtagaataaagagcaggaaagagtcaaacaagatatggtttgagtcagagcactgatactttttgtagctgtgtaactgtggggaggtcagtcaatgcctctcagaatgaatttcctcacctgcaaaataataataataatgacaataataataatgatagaaatgtactactttgatgcactgatgtattacagaaagaaaaaaaggcaaattttgtctttaaactctcagtttaaatcagtaaactagataccttttttttttttttttgagacaacatgtccctctattgcccaggccagagtgcaatggcatgatcataactcaatgcagccttgatctcctgggctcaggggattctcctgtgtcagcctccccagtagctgggattacaggtgcacatcatcatgaccagttaatttttaaattttctgtagaggcgagatctcactatgttgctcaggttggtcttgaactgctggcctcaagcaatcctactaccttggcctcccaaagtgcttggattacagctgcaagtcaccgtgcctggctgaactagagtgcttctatctaatcctataggaatcccttatttcttattgctgcaggatgaaaattaaacacagattttaattgtgtggattgaagaattatatcagaagttgaaatcacatcctcaccaagtcttatatgtgaaagttagggcattggttgggaaggagaggaaccctgatacttcgaatggggatatctgggtagcctcagatgaaactgagtcactctgagcatcctttctgaatgaatgtatcttcccctctcatggtcgaggacactagttttctctttcttataataacaggggagttatcttgaaatgggcagtatattctcctcaatactcaccttgtttatttatttatttatttatttttgaggtggagtctctgtcacctaggctggagtgcagtggtgcaatttcagctcactgcaacctccctcccaggttcaagcgattctcctgcttcagcctccgagtagctgggattacaggtacctgacaccatgcccagataatttttgtatttttagtagagacagggtttcaccatgttggccaagcttgtctcgaactcctgacctcaagtgatctgcctatttcagcctcccaaagtgctgggattacagatgtgagccaacatgcccaacctcaccccatttattattttctgtctacagatccctaattagagtcagatcgcagcatattttgggtgacaagtacaagtatgatcttggagataatagcatatactccaaaataattgcaatgcttcttgtattttgcataggctgaaaccaaagttaatagaaatggtaatataggctgagcacagtggctcatgcctgtaatcctagcgctttgggagaccaaggcgggaggttcacctgaggtcaggagtttgagaccagcctggctaatatggtgaaacctcgtctctactaaaaatacaaaaattagctggacgtagtggcacgtgcctgtaatctcagctaccagggaggctgaggcaggagaattgctggaacctgggcggtggaggctgcagtgagccgaaatcccaccactgcattccaacctgggcaacagactaagactccatctcaaaaacaaaaacaaacaaacaaaaaaagaaatgataatatattataagggtgttagatcaaggagaatagaatataatattagattgggctgaatttgtagatcgtggtatacttaaccagaaattctggattgagtatgttagctcaggcagctttaaatggctctaagaattgagataggtgttgagagaaacttggtctcaagagtgactttaaagtcaatgaacttgagatgccacaacttcatcagcattgttcagaggaaggaatccagaagtttggagagataggaatgttggagtgggtttattgtgtgcaaccctctctgtattgcctcacccactagatcttctatgagtgctcatcatctctcttcatgaaggtcatgaagagaggtctacattaagaacttttgggcttggccaatggaaggttgagagaagagcaaggtcagattatcgtgcctggccatgtgataacagtggttgtattcctctgccagaaaccatgtcctcctgctggaggctctcttttacccctatacagtcagtctcagtttcagaaacttgtccctctcactgcacctttccacctagggatgatgatggcttatccttactgtaagccatagagtgcttcaacatcttgtaggtttccttcacactgccctcaactttgtaaaaagtccctccattggccaggcacagtggttcacacctgtaatcccagcactttgggaggccgaggcgggtggatcatgaggtcaggagatcgaggccattcttgctaacacggtgaaaccctgtctgtactaaaaatacaaaaaactagcctggtgtggtggtgggcacctgtagctccagctacttggtaggctgaggcaggagaatggcatgaacccgggaggcagagcttgcagggagccgagatcgcaccactaaactccagcctgggtgacagagcaagactccatcacaaaaaaaaaaaaaagaaagaaaaaaaaagaaaaaaaaacccctctattaagcactcatattttcctgctgggattctgatgcacaaagtctatcaaatgaatgcatcataatttgtttaaccaatatcttggtgcacattttggtttcccgttttccattatgtaaacagttctttgatgaatctagatgattttgcacactgtcatgtacatcgtaggagacattactagaagtggagttaactgagtccaagagtatgttcttttgtaatttagacaaaagcgttcacattactctcctctgaagctgtaccaatttacagttccaagaaccgtaactgagagtaaggattgctctgggaggctgaggcaggagtggataccagcctgggccacatagcgagacaccacctctacaaaaatatttaaaattttttctactactagggtgtagtaccctagtactgcctgtggtcccagctgcttaggaggctgaggtgggaggattgcctgagccagggggtcaaggctacagtgaattatgattgcaccactgcattccagcctgggtgacagagcaagacattgtctcaaaaaaaacaaaaaaacccaccccaaacaaccaacaaaacaagaggccatgttttcacacccagtgatcttaatagctcaagttttgctttagagactgtggttttaacatctgctatagtcctgatgctgaagaatcatggagtcaaaggtttcagcctctttccaagggggagagcacatggacaattaccatctcatgcaggcatttggttttatggactcacatgcttgttacaaaaccagacacagctttagggcttgttattaccttcccccaacccatccttggtagaagacagtcaacaaatgatatctaagctgccaacacatattggaaaatgtttgaaacttgagatctgtggtttattatgaaacacgcagtgccctggagtttgaatttcttcccggttggtcttagtaccctgtctacagattgaggggaaagggcaggaaggggagtaagtgtagttaagagcatagccttggccaggtgcggtgtctcacgcctgtaatcccagcacattgggaggccgaggttggtggatcgcttgaggtcacgagttcaagaccagcctggtcaacatggtgaaacccccatctctactaaaaatacaaaagttagccaggtgtggtggtgggtgcctataatcccagctactcaggaggttgaggcaggagagtcacttgaacccgggaggcagaggtttcagtgagccgagattgtgccactgcattccagcctgggtgacagagtgagactgtctcaaaaaaaaaaaaaaaaaaaaaagagtcaaacagatctgactactacatctgtgatctgtgctaggtcctttcagtggttgaaccttaatggttgtgactctctgtttgctcatatgtaaaatgtggatgatcatagaacctttatcacagatttgtgaagactgcatagcacactccatgaaaagttctccttagcacagcatcaggcacagggaagctcaacgccttgaaggtgctgtttttatttctaggtccctaagatcttcctcgtcctccttatggctcccccctttattctccatatttgttccttccttgaaagtcaagggtgcaggaagaagatgatatcctggaggccaagcccacacaattaggacatgtagtggacatttacctgttcttagatccactgctgctcttcctctgcttgtctatcacaaggggctgacacctgcacactaattctgtcttgagggagactgtgtaggggaacatggccatttgagttcattaggaaagggttttgaggtcaggacatgggtatttggtgtacatgggagtttggtggcctctattgtaggaggctttggaaatgtgtattgttgggaggtcctgagggaggaagtttgggatgaacatggagattctaggctgtggaggaagatgtaacatggctattggaggattctgggaccttaccttggtaccttggtaatgaggacatcttcagctttatttttatgtatttacttttttttgagatggagtctcactctgtcacccaggctcgagtgcagtggcgtgatctcaaaatactaaaaattagctggttgtgttggtgggcacctgtaatcccagctacttgggaagctgaggcaggagaatcgcttgaacctgggaggcagtggttgcagtgagctgagatcatgtggctgcacctcagcctgggtgacagagtgagactctgtctcaaaaaaaaaaaaatgttcatgcctcagctgctcagccagtagtcattcttttctcagtagctgttttctcctcagctttgtggagtctttccctcagcctgtgcagctctgtattcagccaatgatttgaggccactgtaagcagctctttccctttggagctctttttgtaagcaaaagctcagtttcttacgtaagaaaacccaattccccttgaggaagagaaagagctggagtcctttaaaattaactgcctgtttttctgtggctagggagccttatctctccctttgccaggcattgtgaagactctgtttctctagctgtgcagctgcaaggtcactagacagataatctcaagtcgtaaaatatgccgttccttgaaaagtaagaaatgatgtaatgcatgtctcaactggataagtgtctttgtttctcgattctgttttatgcttccccctgcacagatctcctcctgcaccagaagtgcttaaaaggtaactggactctttgtttggggctcagtcattttggatgttgatctgactgggccggtgcacctaaataataataagaaatcctcctcaacccctcagtctctctgattcctaaattatctcactgcaaaggcaagataattgcttgagcccaggagtctgagaccaacctgggcgacatagtgagatcctgtctctacaaaagattaaaaaaattagccgggcattgtggcgcatgcctgtggtcccagctactcgggaggctgaggtggaaggattgcttgagcccaagaggtcctggctatggtgagctatgatcacaccactgccttccagcctgagtgacagagcaagaccttgtctcaaaaaaaaaaaaaaaaaaattgggctgggcatgatggctcaggcctgtaatcccagcactttgggaggctgaggtgggtggatcacctaaggtcaggagttcaagaccagcctgaccaatgtggtgaaaccctgtctctactgaaaaatacaaaaattagccaggtgtggttgtgtgcacctgtagtcccagctactcgggaggctgagacaggggcctaggattaaataaggagttttggcaaaactaggctggaactccaaaacctgctacgtaagtactcacgagggttgctagttattagtattattactttgttgttatttttaggagtggagcaggttgtatttgtatcttacatcaccggctctggtcagatttcaattaatgtcacagataggatttaaacatttcttttattatttttaagattttaggccaggcacggtggctcccagcactttgggaggctgaggggggtggatcaccagaggtcaggggttcgagaccagcctggccaacatagtgaaactccgtctctactaaaaatacaaaaaaaattagctgggcatggtggcacgtgcctgtaaccccagctattcgggaggctgaggccaggagtttgagactagcctgggcaaatagtgagaacttgtctctaccaaaacaaaacaaaacaaccaacaacattaggccaggcgtggtggctcacacctgtaatcccagtactttggggggccgaggcaggcagtggattgcctgaggtcaggagtttgagaccagcctgggcaacatagtgaaaccccgtctctactaaaagtacaaaaattagctgggcatggtggtggggcaccaggaatctcaggacttgggaggctgaggcaggagaatcgcttgaacctgggaggtggaggttgcagtgagccatgatctggccattgcactcctgcctgggtgacgaaagtgaaattccatctcaaaaaaaaaaaagttagctggatgctggatgtggtggcatgtgcctatagtcagccactcagaagactgaggtgggaggatcacttgagtctaggagttcaaggctgcagggagccgtgatcataccactgcactccagcctgggcaacacagcagactctgtctcaataaaaaaaaaaaaaaaaagcgcagaagaatattagtttatggagagtattatttaatctttagaaattttctgtacaaaacaaacaatggaaaataagaaatgcattactctataataaaatatagccttttctctctcacatatatatgaatggataaaaacagtcataacttcctacacatttaatcctctatactagcttccatacccatttaccactccctcaaagacaaacataccaaaaagatgctaagtaaatgaacaaaatacttggtattcttaactatctaaagtattgtacttaacaggtattttcttggctgactggttctccatacccaacaaacacagtgatgtcagctctcaccactcacattaaacaatatagccattgctgtaaagtacaaaagagaaatgcagtacaaattgaaaaggaggaaataaaacttttattcatcgttgatattatcagatacataaaatcccaaggagacaaaagctactactaatgagattagaaggatcccagaaacagacacagacatgcacacacacctccccacagacacagatacacactcacaacacactcagaagtacattttattttattttgagacagtctcgctgtgtcacccaggctggagtgcagtggctccatctcagctcactgcaacctccgcctcccgggttcaagcgattctcctgcctcagcctccccagtaggtgggattacagatgtgcaccaccatgcccggctaattttttgtatttttagtagagatggagtttcaccatgttggccaggctggttttgaactcctgacctcaagtgatccactcactttggcttcacaaagtgctaggattacaggcgtgagccaccacgcccagccagaagtatcttttaaacaggatttttaaaagtgagagttgaccctttccataatctggagttgggatgggcattagtggtttggagaggaaagagcaggtgtgttgtggctgggaggcgattcctttcagcaccttgggtgatgtctgaggccatacccactttctgtgctagttttgggattatgatgattaacccacactccctttgttcctcccatgtaagctggattcttgggcattcaaccaatattaaacccttcctctgaaaaattcctggattgacgagaccacactggacccattttcattccctgtcgtgatcaataggtatcaaaagaaatgatagcttcttagaatagaaatttgcagccactggggaatgtagttcttaatgtgaatacagaagaatctcattataaaattctgtatggctctgaatttaagattttgttaatttttattttttttgagacatggtttctctctgtcactcaggctggagtgcagtggcacaatctcggctcactgcagcctctgcttcccaggctgaagcgatcctcccacctcatcctcccacctcatcctcctgagtagctgggaccataggcgcacacttccacgcccggctaatttttttgtgtttctgtattttgccaagttgcccagctagtcttgaacttctgagctcaagcgatctatccactttggcctctcaaagtgttgggattacaggtgtgagccactgtgcacggccaggatttaagattttaggggatattgaaagcctttgattataataccattgaaaacacaaaatacttaaagataaaattaacaaaagttatgcaatagtgtaactacaaatcattgatgagagagattaaatatctaaataaagagatatatcatggccacgaattagaagacttaatattgttaagatgtcagttcttctgaaattgatcaatagattatttgtaatctcaatcaaaatttcagcaggctgtctttgttttggtataagttaataacatgattttaaaattctaagctgtggctgggcaaggtatctcacgcctgtaatcccagcactttgggaggctggggcgggcggttcaccttaggtcaggagcttgagaccagcttggccaacatggcaaaaccctgtttctactaaaaatacaaaaatgagctgggcatggtgttgggcacttgtaatcccagctactcgggaggctgaggcaggagaatcacttgaacccaggaggcagaggttacagtgagccgagttcgtgccactgcactccagcctgggtgacagagagagactctgcctcaaaaaaaaaaaaaattctaagatgtatatcttttacaactaccagtcaaagtaattataaaagagtaacaaattcagagggctcaccttattttaccataaagtagtgtaggcatatactgatcaattaaatagaaaagaaggtctagaaacagacacttatatgatcaatggatttttgattaagatgccaaagctattcaatgggagaaaggaaagtcttttaatgaaagtgttggaataactgaatttccttaaggaaaaaatatgcttttgctcttatttcactctatatttaaaaattaactcataatgactcagacttaaaagtaaaagctataactgaattcttcaaaagaaagcataggagaaaatctttatgaacttggggtagacaaagatttttaaaatgaaaagattgatcatagttctttatttggaaattaaaataaaaatgccataagcaatgacacaaaaaatggcatacctagcattacatttggcttacatttagtgtaagatctatacagtaaaatccgctaaatattgctgtgtcatgttgaggaattttttccttccttcccttcctccctccctccctccctctttcttttcttttccttttttattttctttcctcttttctctctctctttctttctttctttctttctttctttctttctttctttctttttcttcctccctcccttccttccttcctttctccctcctttcctctctccctcccttttattttccttccttccttccttccttctccctctcttttttttttttttaagacagagtctccctctgtcatttaggctggagtgcagtggcacgatcacagctcactgcagccttgtcctcccaggctcaagccatcctcccaccttagccttccaagtagctgggactacaggtgcacatcaccatgcccagccaatttttgtattttttgtaaagacagggtttcaccattttgccaaggctggtcttgaactcctgagctcaagcggtcctgcctgccttggcctcccaaagtgctgggattacaggtgtgagccaccgcatctggccaatcttttctttttctttcataaaagttgtactatttatgaagtacatgtgatattttgacacatagacacaatgtgtaataatcgaataaaagaaattcggatatccataacttcaggcatttatcatttctttgtattaggcacattccaattccactctcagttattttgaaatatactaaaaatcattgttaactacattcaccctattgtgctaccaaacactagatcttattctttccatataactgtatttttgtacccattaaccatctcctttttatcctcccttctccactaccctttttagcttctgctaaccatcattatacctctacctccatgagttcaattttttttggctctcccataggagtgagaacatgtggcctttgtcttcctgtgcctggcttgtttcacttaacataatgtccttcagttgcaactgtgttgtaaatgcaggatctcattcatttttatgactgaatagtactcctttttgtgaatgtaccacattttctttatccattcatctgttgatggacagtcaggttatttccaaatcttggctactgtgaatagtgctgcagtaaacatgggagtgtggatatatcttggatatactgatttcttttctttggatatatacagtgggattgctggatcatagggtcattttatttttagtgttttggggaacctccaaactgttttccatagtggttgtactgatttagatttccaccaagagatatgtatgagagttcccttttctccacattcttgccagcatttgttattgcctgtcttttggataaaaaccatttgaactagggtgagatgacatctcattgtagttttgatttgcatttgtctgatgataattatgttgagcactgatatggtttggatctgtgtccccaccaaatctcatgttgaattgtagctcccagtgttggaggtggggtctgctggagggtggttggatttctcatgaatggtttcatactgtcctcttggtgctgttcttgtgatagtgagtgagttctcatgagatttggttatttaaaagcgtacagcacctccccgctcactctctcttgctcctgcttccgccatctaagatgccttactccctctttgctttctgccatgattggcagtttcttgaggcctctccagaagcagaagctgctatgcttcctatacagcctacaaaactgtaagccaattaaaactcttttctttataaattacccagtctcaggtatttctctgtagcagcatgagaacggattaatacaagtctcaggtatttcttttcttttttttttgagatggagtctcactctgttgcccaggagtgcagtggtgtgatctcggctcactacaacctccgcctcccaggttcaagcaattctcatgcctcagcctcccaagtagctgggactacaggcgcccaacaccacgcctggctaattcttttgtatttttagtagagacagggtttcaccatgttggccaggctggtttcgaactcctgacctcaggcgatctgcccgctttggcctcccacagtgctggggttacaggcatgagccaccgtgccatcaggtatttctttatagcagtgtgagaacggattaatactagcaccttttcatatacctgtttgccatttgtatgtcttcttttgagaaatgtctattcaaatcttttactcatttttaaattggattattagatttttttcctattgagttgtttgagctccttattttttttgtcaattattctttgtcagatggaaaacttgcagatatttattttctcccactctgtaggttgtctcttcactttgttgattgtttcctttgctgtgcagaagcgttttaacttgatgtgatcccatttgtctatttttgctttggttgcctgtgcttgttgggtattactcgagaaatctttacccagtgcaatgtcctggagagctttctcagtgttttctttagtagtttcatgtttgaggtcatagatttaagtctatgatccattttgatttgatttttgcatatgtcaaaaaataggggtctagtttcattcttctgcatatagatgtccaattttcttggcatcatttattgaagggactattatttccccaatgtatgaatgttcttggcacctttgtagaaaatgagttcactgtagatgtatgaagttgtttttgggctctttattatgttccatcggtctacgtaacttgttatgctagtaccttgttgttttggttactatagctctataatacgatttgaagtcagataatgggattcctccaattttgttctttttgcttaagatagctttggctactctagatcttttgtggttctgtttaaattttagaattgttttttctatttctgtgaagaatgtcattggtattttgataggaattgcattgaatctgcagattgctttgagtagtatgaacattttgacaatattgcttcttctaatccatgaacacagaatatcttttcaatttttggtgtcctcttcaatttcttttatcagtgttttatagttttcattatagagatcctttacttctttggttaattcctaggtatttcattgtattgcagctactgtaaatgagatcacttttgttttgagataaggtcttgctctgtcacgcagagctggagtgcagtgatgtgatcttggctcactgcagcctagacctcctgggctcaagagattctcctactttggcctcccaggtagctgggattacaggcgcacaccaccaggcccagctaatttttaaaatatttgtagtagagatggggttttgacatgttgcccaggctggatttttaaaaatttcttttttaaattgtttgctgttggcagatagaaatgctagtgatttttgtatgttgattttgtatcctgcaactttactgaatttgtttatcagttctaatagtttttttgtggagcctttaggtttttccaaatataggatcatatcatctacaaacaaggataatttgacttctccctttccaatttggatgcgttttttttccttctcttgtctaattgctctagctaggacttctggtactatgtcaaataacagtggtgaaagtgggcatctttgtcatgttccagatcttagaggaagactttcagttattccccattcaatatgatattagctgtgggtctgtcattcatggcttttattatgttgagatatcttcctgctatacctagttttttgagggcttttattatgaatggatgttgaattccatcaaatgctttttcagcatcagttgagatgatcatatggtttttcttcttcattctgttgttatgatgtatcacactgattgatctgaggtgccacctcagttgcaatagaatagagcaccaggtagattgctaaggccctggctcctggacagcatctctattcctccctggggcctggaagaactcaccaccccaaagggaagaacaaaaacctccctcctccctaaactcctggcaactactatcttgtactgtcttcacagtttcatttctccagaatgtcatatagttggaatcatatagtatgtggccttttcagactggcttctttcacttagctacatacatttcaggttcttccatgtccttctgtggcctgatttctttttattgccaaatcatatttcttttctttctttctttcttttttttggcttttttttttttttttgagacaaaatctcactgtgtcacccaggctggaatgcagtggctccatctcagctcactgcaacctccgcctcatgggttcaggcaattctcccacctcagcctcccaagtagctgcaactgcaggtgcatgccaccgtgcccagcttatttttgtatttttagtagagatgggtttcaccatgttggccaggctggtctcaaaatcctgacctcaagtgatctgcccgcctcggcctccgatagtgctgtaattacaggtgtgagccatcatgccctgccatatttcattgtatgaacatatcacagttcatttatccattcacttgttgaagaacatcttggttgcttacaagatttggcaattatgaataaagctgctataaacatctgtgcagaggtttttgtgtgactgtatgttttcaactcatttgggttaataccgaagagcatgattgctgtagcacatggtaagaatatgtttagctttgcaagaaaccgccaatttgtcttccaaagtagctgtgccattttgcattcccaccatcaatgaatgacagttcctgttgagccacctccttgtcagcatttgatgttgtcagctttggattttagccattctaataggtgagtagtggtacatcattattgtttcaatttgaaatggctactgacatatgatatggagcatctttccttatgcttatttgctatgtgtatattttctttggtgaggtgtctgctcagatcgtttgcccattctttaattgggttgttttctactgttgagttttaacagttctttgtgtattttgaatgtaagtcccttatcaggtatgtcccctgcaaatatgttctcctagtctgtagcttatattgtcattctcttgacaattcttttgcagagcagaagcttttaattttaatgacacagaacttatcaattgcttctttcaaggattgtgcttttggtgttgtatctaataagtcatcaccaaacttaaggtcatctagattttctcctacgttatcttctagaagttttgtactcactattcatttaggtctacaataaacttggagttaattttcgtgaaagccgtaagggagcttctaagggggacacacactaacttctttgagagtgggcagtgattgtgaaactctcagctgggtcttacaacagaccccagatccatcaggagagcccagccttcagaacccatagtggaatatgtttcatgcatacacggaggagaatatgcagtcatatgctcacatgcatgtctgaacatgatcacacacatgaatatggctatgtcctgatccagagttctctcattctctgtaagtgattctttccttcaacttcttcattaagggatatattgacagaatgtcattaaaattaaaaacttctgctctgcaaaaaattgttaatggactgactctgtatgtccattcatgtctcgttgtgtccctggactgactctgaatgggctacagtggccttatctggtagcaagcacagattacacccgggtattcaaagcatgttgagtaggtgagagtgtgggcatgtgtgcagtgaaggcaggacagccacccgccaggtctctggaaaactccccaggacagggatgttcaggccatgtgatgctatactaagctgttttacgtgaggaatgggtggtttttaagaatgtgtctagagggctatgggcacagatctgtgttcaaagattttctgggcacttatgttttgtgagacatcagatagagccaactttctaagcctcagctttgtcacgtgtaaaatgggcatgaacgcttttccccttcgcagaggtttgtggcaattaagtgaggtgagcgtgcaatagtttttgaacaaaggtgacacgggggtacgtgctcaggaaataagagctgctattattactactcttcatagcataatgtaaggtttcccttcctctcatcccagctcggaagcaccttatcaaggtgaactgagccgcttctgtttcttctcttccctctagccaccacgccccttcctttcccgcatcttccccccattcttatacccgcctcttccgcgaaccccgccctgaccccgcctttccctggccccgcccaccagacctgcaccggcacagccctcgctcagcggggcaggaagctcatggtgtagtttcgtgggatcgtggcaaagaccacgtgtttgggggacacgtcaatgtccttaggtgactgggaggacttgaggcggaagttctgcatgacggtggtgaagaagagaaagagctccattctggccaggccttctccgaaacagttccgctttcctgaggaggagaggcgggaggggtggaggtgaagcccactctcagtgcagcctcgccccagtaccgacctccagctgcggctctcccagggaggaggggtggaatattatggcctgagagagtttcagaggaggctctgatcctccctgagcctcagtttctttctacaagagatgtaacaatggtgaaccaatattgatatattattactaacaaagtccatagtttacactagggtttactctgtgttatacagttctatgggttttgaaaaaggcataatgtcacacatccatcatagatggggtgatccatgccaggtgtagcaatgggaggtttagatgtccttcttgccagatacacttgcaaatatgactgctgtgccgtcatctcctttttagggatctgaggaatctgctgtgtgaccctagagaaatacatctacggggaaagatgtttcctttccttttacctgggtgcaggtactgggtgcttggtagttaaggaagtatcagctgctggctcaagggtagattctaacaggaacttccaagctggagaaataccaggctacaccgcagagaggggaggtgggtgagggaggcgcctgctggtgtgagcagtggcctggcagcaaacagtggtctcttaccgatggaaaagggcacaaaagcatcactcttcttaaactgccccttgtcatccaggaaatgctggggattgaagtcctgagggttggagaagaagctggggtctctcagcacggagcccagcatagggaacacttcggtgccctggtagggaggaggaagttgtgtgtgatgaggagggtcgggggattggtgaaagtacacaggggctggagggggaactagtgtgccccaggtaaggggaagtggcaggcatggaggagttggggtcctgtgaaggaggagctttggggaatagaaggttcacatctctgaaacaggaagtttgggagacatggggtccatgtcttgctacgcaggttgtttgggggacctgaaatttgtgtccctaagacaaaaggcctaatggaaagggggcttctgtttcttaagataggaagttttggaacttgagtttgattctcccgacacaaagagtctggggagatgcaggactcaggagtgtctaagtggaaaggtggaatggatgtggtggttggggaagtcctttttgactgattgagggagtgggacagtgagtagaaagcttctaatgggggcaggattctggggacacagagaagggctggaagtccccgtagtctagggggtggggaggatagcaccttagggaggaaaaaatcccgaaacttggtgtcctttttaaccctgcgggccaaactcatggggatcacgtctccaaatctttggatctcgtggatcactgcctccatgtagggcatcttggtccggtcctcaaacttgggctgccggttcttgccgatcactctgtcaatctcctcatggaccttggctgggggaggagggggaatgtgtttaggtatctgggagtctcagagcaggaaatgatagtctgaataggtaaaacggggtggatgatacggctccccctatgagacggaggtagagcattcataacagaacagacatcggccattcgcattgttggagtaggatcctgttaaccaggttgtgccagaatcacaggggaggcacagggaggaacttaggagatgacccgggggaaggggcagcgggcactcagtgggcttgggacagaagtgactgaccaatcagtgcagacattttcaatattttaatagctaatgagactcagctgatgcctaccagctgaatgttgccctgtctctggacagcaaggcacgtctcagggtcctgggatctgggacaggtagggacattgcaccagtcgaaggggaattttgagggtctggggccctccacttccgtccccctccagccttaccctccacctctgggtgcttcatgagcagcaagaagccatagcgcagggtggtgctgaccgtctcggtgcctgcaatgaagaggttcaacgtgctcatcatcaggttcttcaagtagaactccgtgttggggttcttctcctcctgcagggagagggggctttaggccaacctcactcctcttgccctcagggcccttctagggcttttcctttggatctacctctctttggtccagaccaaaggtggaaagagggaccctagatctaccagactcgctctaggttccagcccttgccctggctgctggctttgcccaaaatgctctttcttctcaccttctttacgttgctgaccatctgtcctttaattatcaacttagctgtcagttttttttttcttacactgacttggtcttgctaagttgcacaggctggactcgaactcctgggctcaagcaatcctccacccttagcctcctgagtagctggaactgcacacgcgcatgaccatgcaggctcacttactttttaaacaattaattaattttttttgagacagggtctcattctgtcacccaggctggagtgcagtgccgtgatcttggctcattgcaacctctgccccccttcgcgccaccacgtgcagctaatttttggatttttagtagagacagggtttgaccatgttggccaggctggtcttgaactcctgacctcaggtgatccacctgcctcggcctcccaaagtgctgggattacaggctgttagccacggcgcccagccaattgtgaggattattatgatgagggctaatttgaacgggtctgtgtcgtctgcccgccccactcccagtctgatttccctctgcctggctttgcacctccccgcactggctgctggggtgtacctcctgcatgtggatgagaaaggagtcgatgaagtcctgtggggaattgggatccagcgtgcgctggttgtgctccaccttcttggctatgaagtcctccagcccttgcagcaacttaaaggcctgttgctgtggtcctggcaggtgtttcatcaccgaagagaacatctcatagagctggggttgcagagagaggatgggaagggaaggacagctgtcacggggcaggagctgatgggaatgggatttgtttcatagcaaggaaggaactgagttaaaggcatctgtctcattgtttaggtatttcagtggggtcggataggaacttatatctaagttttcaggaaggttaggtaccagggccacggtctagtaatttaggtgagaagaactgaggcatatatccaggtttcaggtatgcaaatgaggctggattggagcacacatctaggtgttcagatattcaagtgaagttgagttggaagacacctgtccaggtgtttagctcttcaggtggggctggtatgaggtgagtgtcacctgtctaggtatttaggcattcaagtaggcttggttggagacagctgtccagatacttactgggtctggattgggggcttttgttcaggtgttcaggtattaaagtggggctggtgaagatgttgaagtgcaggggatacctgttgaggtgtttacctatccaagtgcgatgcacagggagcacctctgtaaggtgtgtgattggaaagggttggggaacacttatttgtgtgtcagggaacaatctgtctagatatttgtgtgtttaaggtgttggttagggcagctgtccatgttttcaggcatttaagtgggtgaagtagagggcgcttggccagatattccagtgggctaatctgggacatttgtgtagatgtgaaatgattatgatgggctggattttgcagcaccaggtgttcaggcatgcaggaggcgggttgacgcagtcatttgtccaggtgttaaaatattcagaagaactgggtagggagcatctgttagaaattacggtaagttggggatgggaacacgtgcccaggtgagagagctgagctgagggtatgtatcctaccagcaggctctgttttggggagcatctgttgagctatccaggtgtccttggagacaggcttctggtgcaactgtccagttgtccaatatcgggggctgattttgaggggacactgtctggagcggggtgggagtttggggcacctgtctccaggtaggggagcagttggcaggttgtggtaggggcgtcacgggccgggctgcagccagttacctgccccgtggaggttgacgtgaactggaagattcctagcatcatgctcagcagtgacaggaactctttgtcctcatagtcaaagcggtccccaaagacaatggagctgatgacattggagactgtgcggctcaggaagaaggtgggatcgatattggcgcctgcgggtgtggagggagaagggggttggggagagagtcaactcagaggtctgaggagaatcagaattccaggaggcagggccttgttgagccaaattcccagcgccagactccagggctggaagtgcgggcgcctttccccacctagtccccatccgcaggcagaacgcgcgcgggttcctcgtcctgggtgttttccttctcctgcccccgcactcggggaaccttactcaccgtgcgtgctccggatggcctcgatgaggaagcccgactcctcctggatgcgctcctcgatgcctcgcttgcccaccccgaagtccctcagggtggcgatggcaaagcgcaggagctgcttggcgcgctccccgttgctgaacgccacgcctggggaggtcaaggcgggggtggagagaggtcagggggcggcggtggcaggagcggaccagttccaaggggctccccaagggtggagcagaggggtagtggggtgggagagagatggattcagtgccagtgcccaggacaggtgcaaactcagtcagagaaacacgagggagagagagagagagagagagagagagagagagagagagagagagagagagagagagagagagaccgggtagaaagaataagagaatcagaagagaaacagaaaggccagatagagatgcgcagagaaacagagggataaggggatactccatggaggaagggtaggaagtggggagagaaagagagagatggaggaagaggatggagggaggggaagtgagatatggggagatctgggaggaggaaataaaaatggtgaaacattcttaagctgagctggagaagagagaaaaatactgagacagaaacagagagggtctggaaggaagagagactgttaccaggagatggaggctggagatgtggaagtaagaatagcatgaaatcctaagggagaggaaaaagtgagagagggaagtggagagaggagaaacatggagaagcacagaagctgagagcaacaaaaagacaaatgaagacagaggaccagggctggaaaacagaaacccaggatgtcctcagagatggagagagaggggaaagaggagactccagtgagagagaataaggaggtggggcagagagaggcagggaggaatcacgacagggacgctggagacaggtgagggatacacatggagaggccacagtgaagggagatggggagataagaccagaccgggggttctgccatagcctccagtgggcaggagagtcagggagaaggctggcaacactgagaccatcgtgtccgcctggccaccttccccatcttgggcaccccctcaccatagcctttgaagacccagtcgaaggtggcttgctcgcctcgcccgctgaactcctcagcctggtccaccagagcctccctgacggcatcatgtccacacagcaccacgacccgccggggccccaagtgaatggtgaacacggggccatagcactcactgaactgatggaggcgagtgggagtggttagagggagcagcccccactctgaatggggcccagcaccgagatgtcaagtactgggatccttcacccccaggttctcacagtcagggagctggacatcccaagatcctgtctttcctggctaggacccggatgctgaaactccaaaactccctttcctaagactctggtccacactggtcaatcccctgccacaaagccccagccaactaggcagcccccaccctgtgccacccatcttcctgccttgggacaccttcatgatggagtcacatatgtgctctgtgttcagctggaggtagtttccaatgaagggcagtggggtgggtcccggaggcagcttccccctgctcttcctctgctgccagacagacatcaagaccatcacagtcaggcaggccagcaaggccaccagaagcagccctgaggccagcatggtggtagtgagatgacagatggtgatgggtggggtggtttgcctttatactgcctgaaaaagagggatggactttggctaattacataatcaccttatttcacctcccaactacacgccccaccatgaatgccacctagcttgggacacagccagcaagggaggataaggggaccccagggcagctgaacagagagggggcctccagactaaatctgtggtacttcaggaggggtgccgcagggctgtggatttaggagggggcaaccgataaactgtagaactgaagagtttggaatatttgcataggggagcacttgggctttggatttggggtctgagagtgagaatgcaccccaaagttgtggatttgggcattccaagggagaggaatccaaaggtctgggttttattagggtgagatggaagtgtggctgtgcatctggaggtcttctgttgcggaggatgcagggttaagggtctcaggaggggggactccaggcatatggacttgaaagtctcggggctaggaagacccagggctgtgggtgtggagtttctgggaggaggagtgtgtagcaagccagcaggtgctcccagaaagcccagcagcccagcaatgggcccaggggctgacttgattttgcttttgcccagagctatctcttgatgcccagaatcctcattggaacctcagagtgaggccaggatgggtgccatggaacctccactgcccatctctggttgggaaaggggtggaagaccagggccatatttcaggggaactttccccacacctggagaagagtacctggagttagcggttggcagagggattggctaggtctggagaaatagtaataacaacccccaaatggtggaaaaatctcaagtgtcccaagggttgtccgctggtttccaacccagatcctcagggaaacccactagattgattgtatcatccctattaatattatgattgttgtttatgtttctcattttatataaagatctacagaggacagaaaacagacagtgggcaggggacatgtgtgagtggccctgaactcccatctctcctgctctgtgtacttagttcccctttctggatttggttttcctgccagtggaaagggagtgtttgggaagagaagatcacatttgagggtgagttaagtctcctttaagggcgattcctgctttgtcaggggctactactattagcaggcagagggaacagtcgcagaagagattggggtaaactccagtgttaggcacagaggcagatcctggggtgggtgtgagtggagaagggatgagtagccctcctgtccttccttcagggaaattcttccttagtaaacaggacagttaccctttggtgagcatggtcatatatgggaagattaagtctaggtgtgtatgatctggttgaatctttgtaacagtgaggttggttcatcgtgatcatcctcattttgaagatgagcagatctagactccataaaccctcttgagtgaggtcacacagggagtaagtgagggagctgggatgtgaactttctcctcgccccccttcattgactggcctagatcaccctgggagtcaagtgcgggccagccttagcaggaggtgagtgctgagactggcatcagcagtggacacactgatgacattggcgggttctgatatcagcatcaggtatggccagggagggaaaggcatcgtgttggctttgggactgcccccaggtgtatgcgaggatgggaaacaagttggcactgaacttgacaccaggagaatattgaagtcatgtttggtgccaagagggctctgtgtgttgtctcaggtgtcattgagggcataagagtgtcctgcttcaggagggcataagggtggcaccatatagggtctgaggttggtcccagtgggctctgacatgagcatgaggcaggtgctgatattggtcctatgtgggtctgagatgagcctcagccagaccctgagaggggccccagatggccacaggacaggctctggtggttggaccatttagggttgcacctgtcctctgggtcaccaactttggacaagtggaggtgggtgaggttggcacccccaggactgacatcttgctcaaactgttctaggatgctgagctctgagacctgtgtggagggaacaaaggtcagagaacaaggcagagagaggaaagttgtttgttgattttggaggggaagaggtggaaaggaagattagcaccagcttggcagatatcaatccctctaatcctgttcaccagcctgcacctgggcctggctcctccttttccttcttgtttcttaaaaaggtgggagacagaaatctgaggagtttgtttctcagtggggttggcactaagaagtgcactgagtgatcagcaggttgccatgacctggccagggaggggatggggagagacaggttgggagaactctagtatttgtggacatagaggtcaatgaattttggacttgttgattaccctagagcatggagtgagagaatggtgtctgaaatcatgtgggagggacttgtcccagtgggcagtgtcttgggaacaggctttcagagtgagttagtggcgagcccaggaagatccctttcctttgctgggcctcagtttccctttctgaatggatggtgcaatgattaaggcctggattggaatcctaaccttatcctttctttgttgtgtggctttgaacagctgacttcatctctctgagtcttatggagccaagaacagctcctacctctttggctatttaggggagaagtatatgtgttaatgcagatgaggtacatggcagtaagtgctcaatgaatggtagttgttctctttaatctgtaggatgaagcagattgatgagatgttccctaagcacattccttgcttttacattctctagtctaaagctcacaaatcttttcctttgggaaggaggaaagggacagagtctttgggaacctccttcgccatcccttcctcagcacagccaagctttaccccatggagctgtgaataggaaattaatccttcatggcctcctggagtgtggtgctgagttaggcagtatctgcggaaggacaggccagcattagactctcaggttattctggttggccctggagccctgcacaggactttgcccacctgtctgtctatgcttgtcttggatcccatctttctatctttctctttctccttccctgcaagtcagtgttcccctcaatcaccctgtgtgctcgtgcatctttgttttgtgccattttgtccagtgggttctcctggatgcctctgccatgtttatcctcatttatacaactgtgtgtgtgtcattctgggtgcatgcttttagtgtctacgtgcatgtatgtttcagcacgttcatgttgatacatgaatttatgtgtgcaccaggctttgtggtgtgtatgtttgtgcttgataatgggtatccattccaacttatgtctgcacatgcacatgtgtgtgtgtgcctgacagggtgtggcactgtttctcaatgcttgccaatctgtgtctgtctctgcatacagcatgtgtgcacacatgatttaggggtgtctacgatgtgtatttctgtgtagaacaagatgaatgctgcatattcatatttgtgtgtatacattcacaattgggtgactacatataagtatgtggatgtttttttctttgtttttttttttttttgagacagagtcttgctctgtccccacgctggggggcagtggcatggtctcggctggaacctctgcctcccagatttacaccattctcctgcctcagcctgctgagtggctggggctacaggcgcctgccaccatgcctggctaattttttgtatttttagtagagatggggtttcaccatgttagccaggatggtctcgatctcctgacctcgtgatccgcccgcctgggactcccaaggtgctgggattacaggtgtgagccaccgtgcccggccagtatgtggatgttttcatgtgttcattctggtgtgtgtgtgcagacttgtgggccatgttgcatacacgtgaacatgtgatattttcctgtgctcatctgtgtttggattaaaacagtcctatcccagctccatttatctgcttgaaaaaacccccagaactgcaggaagctttttatgagcataatcttaattgaactcctgattgcaagactgaggttagctttatcatctccattttgcaaatgagttagataagttcccccaaagccggtcataagtgacttgcttctgcatttcacagctaatgagtgtagagtcttagtatggtcttgtgtgatggtaaatttttttttttttgagatggagtttcgctcttttgctcttgttgcccaggctcgagtgcaatggtgcgatcttggctcactgcaacctctgcctcctgggttcaagtgattctccagcctcagcctcccgagtagctgggattatagccaccagacgcagctcatttttgtatttttagtagacacggggttcaccatgtttgtcaggctggtttcaaactcctgacctcaggtgatctgcccacttcggcctcccaaagtgctgggattacaggcatgagctaccatgcctggctgtgaatgtaagtttcatgctgttaatcaccactttggactgctaggccccacctgtttttctttatgaaacattagaaaaactgcttgtactctcttgtgtttcttcaaatacttccatgtaaacatgtaacaaaggatttcaaaatgttagaaaaaaaagtcttttaataggagggagacttgaccttctgtagtgtttgcactttttggaagcttaaccaaagacctagttggccagtatacccctcatgccattggcaatgaagcagtgggggagttggggtactagttgttgtggccagagagtgaaatgtctgtgtttcacatttcagattgatgacaaggatttggggggtggggctgtgggaatgttggctgaaaatagagtgaagaaggtcaaagaagagaagacagtcaagattctttttttctgagtgtttggatagctcacatccatggccatgaagttcctccctaccagtaaaatggcaggacttagagttcagagatgggaaagaagttggatagatgatagggatgaacagctttttttttttttttcttttgaggtggagtcttgctctgttgcccaggctggaatgcaatggtgcaatctttttttttttttttttttgagatggagtcttgctctgttgcccaagctggagtggagtgctacaatcttggctcactgcaagctccacctcccgggttcatgccattctcctgcctcagcctctgaagtagctgggactacaggcgcccaccactacgcccggctaattttttgtatttttagtagggactctgtctcaaaaacaagacaaacaaaaacaaacaaacatgatgcaactatatgctgcctataagaaactcattttacctgtaaagatgcatatagactgaaagtacatagatggaaaaagatattccatgtagacaaaaaccaacagcaagcagtagtagctataacttataccagttgaaacagattttaaggccgggcgggaacggtggttcatgcctgtaatcccagcactttgggaggctgaggtgggtggatcataaggtcaggagatcgagaccatcctggccaacacggtgaaaccctgtctctactaaaaatacaaaaattagccgggcgtgcacctgtagtcccagctactggggaggctgtggcaggagaaccactcgaacctgggaggcagaggttgcagtgagcagagatcgtgccactgcattccagcctaggcgacagagcgagactccgtctcaggaaaaaaaaaaaaaaaccattttaaatcaaaaacattaaaaataaaaacaaaacaaagtatgaacccgggggcgggggtggaggttgcagtgagccaagatcacaccagtgcactctagcctgggcaacagagcaagactccatctcaaaaaaaaaaaatattctggcagcatcacatttcttagtcccagaaggagggccatgtgactaggcaaaaaatgacccaggttccatttcatgcacacaccctctggagcacaaatctccttctctctatcccacttagacctgggtttctctcttgtccctgtatctctttgtttcgttgcctttctctttgttcatctccacctccaactttttgtctagttggatttctctgtgagccatgggtgcgtccactctttgggttcctcttgattctcttctcagccgtatgtcactttctcagtctctgtctcactgaaacttttttcctgtcttttattctttctgcttctatctccctctctctgtttctttgaattgtcttttgtctctgtgtcctccttgacatttatctttgactcactgaatctctctctctctcatctcaattttgttttgtttgctttgttttgtttttgagacagtctcgctcttgttgcccaggctggagtgcagtggtgcgatcttggctcactgcaacctccacctcccgggttcaagcagttctcctgcctcagcctcctgagtagctgggattacaggcgcccgccaccatgactggctaattgtgtgtgtgtgtgtgtgtgtgtgtgtgtgtgtgtgcatgtatttttagtagagacagggtttcaccatgttggccaggctgatctcgaactcttgacctcaggtgatccacctgctttggcctcccaaagtgctgggattacaggtgtgagtcactgtgcctgtcctcatctctattttgatctcactctggttctgtttctatgcacctcgattttgtctcaatcttgatttctgtctccatcacataatacctggcataatctgccatgctctgaatttctctgcctcaagtcctctgcaattatttttcctctttagcttgcttctactttttagttcaagttcctccactcctggcttcctatctggaggtggaatggtgaagggagctgttctaagagtatttgctctctcccttcccgtctgagtaggaaaaccagactcaccatcaccacacacatgccaccaccctgaatgggtgttaaatgctggggtgtgaggatcagaatgggatggggaggtgaaatctaagagagtcaaaggagatgggctgagctgagtctctactccaagaaagacattctagcagcagatccaagagacagaacgtggcactgtgtgtgagtcactcagttttcgtagaatttccactgcttctggacacaggatgcctcagctcagccagccaaaccccattcccaaaacttacagataccttgagggattcagtttccaagtctgagaatacagtcgtgtgaaaaggacattgaattttgataaatagtatatgtgggtaggatataatatccaggaagttcatttcaggccaataaggctttgaaaatatttggtgcggaaaaggtagtgaatcactttttagattattaaggaacacaatcactaattgcgctggaggagatgttctcctccagagactggggttcagaggtgatccctacaccttagagttttaaaacacacacacgcacacacaccaacacacaatacagcaaagttctttttttcttttttaaatttgatacagcaaagttctgatacaccaacacaagtaatctttgattattgttatttaacatcttgagtagaaaacaagaactttttgaacaaaacctgttcaattgatttatttctcttgttttctaaatcttcagcttactttccttattaacattctagtgttccattacacagtagggtagctgtagttaacgataatacattgcatatttcaaaatagttagaagagaggattttgaatgttcttaccacaaagaaatgataaatgtctcagtaatggatataataattacccgaatttgattgttatacatcgcatacatgtataaaaacatcacactgtaccccacaaatatgtacaattattatgtcaattaaaaaaatttaataactgtttaattagggttatacttaattaagtaacgaacaaagagttttccttgttgtctatcaagactttctaaaacaacatggtctgccagctgtggtggctcacgcctgtaattccagcactttgggaggctaacgggggggcgggtggtggatcacttgaggccaggagttcgaggccagcatggccaacatggtgaaaccacatctctacaaaaatacaaaaattagctggacatggtggtgtgcgcctgtagttctagctacttgggaggctgaggcatgagaatcgcttgaaccctggaggcagaagttgaaatgagattataccactacactccagcctgggtgacagagtgagaatctgtctcaaaaaataaaacaataaaaaaaaataaaacaacatggtttccctgtttgatagatggggaaacaagtcccagaggttaagtgactttcccagtgaagaaaagacagagctgccacttgtacccagattgtctggatcctaaaatcaatagcctaaaaagataataatttgcctcttacaccccaccaagaaattctgttcaattctgttgagctgagagggaagaacagggagactggaaatatgaagaaaggggaatggccccagaggatttccctgtgtgaattcaatttacctttattcaggtgggagattataggttatataaccacccccaatataaagcaatctcttccccgatgacactcaaacccggaaaacttgaatcccagggtgttcagattttggtataagctgatctcccaggacctacttaggcaggatctggtgcccaggacagaacctgttgacctggcaccatggagctgggaggggctgtcaccatctttctggcactccgcttgtcttgcctgctcatcctcattgcctggaaacgaatggataaggcaggaaagctgcccccaggtcctacaccaattcttttcctggggcacctgctgcaagttcgaactgatgctacgtttcagtctttcatgaaggtgagtctgtctgtctcctttaatagggctaaaagcaactaatcctatagccagattcacatagaaacttatgacttctaaaagatagactctcagaaacacagactttgcaaatcttagaattctgaaattccagaatcctaaaatgttggaaacacacattctcagtgcattgaaataagattttcatgatctcaggactttggaatcacagtacattatatttttaaacacaggattctttgactcagcttgtcttagcactttgagacttggtatcatgaagtcttaagattctagaaatttaacatttcagagagagaagtatgaatcttggaatttatcgaatccaggtcccttattttggagatgcagacagtaactcttgtgggaagggatgagcttttgccgagaatgacagaagccaagacttccgtgcctctttcccagtattccttccaagcccagatttaccttggttccttagtaccatgtttatatccctctaaaatcgccatcctctaaaatcctcaactggcctatgcttggtactccagtcagcccctcctcttgtgttttccttcactccaagctcagggagaaatacagccctgtgttcactgtgtacatgggtcccggccagtggtggttttatgtggacacgaagcagtgaaggaagccttgatagaccaagcggatgagttcagtggccgtggagaactggcttcaataaagcaaaacttccaaggtcatggtaggtagcaacaacaacaaaaacaataaaaccggaaatgactgcaatgcactccctatatgccaggttctttggtaagtagtccacatgacttactgtattgactcccttaggagagctgttaacattatactaatgttgtcaatgaaaaagctaagataggccaggcatggtggctcatgcctgtaatcccagcactttgggaggttgaggcgggcagatcacctgaagtcaggagtttgataccagcctggccaacgtggtgaaaccccgtttctactaaaaatttaaaaaaaaattagctgggcatagtggtgggcacctgtaatcctagctgctcaggaggctgaggcaggagaatcacttgaaccctggaggcggaggttatagtgagctgagattgcaccattgtactccagcttgggcaacaagagtgaaactctgtctcaaaaaaaaaaagaaaaagctaagataaaggttagataatgtcacacagtaagtggtaggataattttattttgagcctatgccatctgactccaaactgttttctgtgttatttctgctcctatttttaatggattagtgagatatatatatatatatatatatatatttttttttttttttttttttgagacagtttcactcttgttacccaggctggagtgcaatggcatgatcttggctcaccacaacctctgcctcctgggtttaagccattctcctgcctcagcctcctgagcagctgggattacaggcatgcgccaccacgcccggctaattttgtattttaagtagagatggggtttctctatgttggtcaagctggtttcgaactcccaacctcaggtgatccacctgcctcagcctcccatagtgctggaattacaggtgtgagccactgagcccgggggattagtgatattctttatgcacccatagccaaccctcataccccttatagctaaccttatttctcatcttcctatacttatacacatacctaacccataggtctctgcctccttcacttaggtagatctctttctctcatgcatccatctctaactgcccacatccttcaattccaaggaggctcaccacattctgcctatcaatctatctatctatctatctatctatctatctatctatctatctatccatctatctttctattaccttttttcttctgtccattgatctatattcatcagaaaatccattcattattctttctataaaaatatctttcactctattatctatacttctgtcaattaactttctatttattcatctagtcatcattccttccattcattaatgctttcatcattcatacatctatcaatctctctatccactctccaactgttattcactcagttatttttttatttatccagttccacctctgcttcctgtaagaaacactctttgatctccccctatcattcctgcactgattcccttttcctccacctgagtctggactttttttttttctttcccgaggatcctgcagagagggaaccttactctcttgattgagtcttgaaggttgaggatggcttcctggacagcagagtctagagctttcataatctttccccatcactgcctaagcacagagttgaacacagcaaggggagggaggcagaagcctgagactgagatcttggcaggtgtagctctggccaatggagaacgatggaggattctccgacgcttctccctgaccatccttcgggacttcgggatgggaaagcagagcattaaggagcgaattcaggaggaggccagctacctactggaggagttccagaagaccaaggtatgagggccacaagggggagggccactaggtgactgggtggttatggagctctcagtcacgagaagatgggccttggcgggagaaagctctggaatggaagaagagggaaaatattaagaatccactgagatttctggcagcttccatattaagagtttacatgatcatgcctgtaatctcagcactttgggaggccaaggcgggcggatcatgaggtcaggagatcaagaccatcctggctaacatggtgaaaccctgtctctactaaaaatacaaaaaaattagctgggtgtggtggcgggcacctgtagtcccagctactcgggaggctgaggcaggagaatggtgtgaacctgggaggtgaagcttgcagtgagcggagattgcaccactgcactccagcctgggcgacagagcgagactccgtctcaaaaaaaaaaaaaaaagagtttacatgagctgggcatggtggcacatgcctgtagtgtcagccgcctgtggggctgaggctggaagttgcttgagcccaggagttcaaggctgcagtgagctatgatcatgccactgcacttcagtatgggagacacagtgagactctatctcttaaaacaacaacaacaaaacaattaacatggaagacccttagagaccacttatctagaaactttcatcagtggatctcagggtgggtctgtgagctctcgatatcctacacagattttggtgacatatgactttgtgactcttcttgaagagagtctcaaatttcattccatttgtatatctgtattgtggtaaaaaaaatacataacataaaatttaccatattcaccattttaagtgtccagttcagtagtgttaagtatattcatgttgtgaaaaaaatcttttgaacttttttatcttgcaaatgtgaaactctatactcatttcattgtgtttttaaaggagttcagttccaccaaaaaataaggtctagaaacactggggtctatagagaaaagacaggctgaaaacaaacaaacaaacaaacaaacaaacaaacagagaaaattagataagaggtagaaatagagacacattttctctacacctgaggctccttgcctggtctctatgggtgattaacaggtctatataaaagcttcaaatgcccatgtaccccagaaattattcataaaattgtgtatttgtgaatatgtgcattattctagagaaattgttcccagatctactgatcttgttttacggaaggtgtaggtgagggcaagggaaggattttgttttgttttgttttgagacagagtcttgctcttgtcacccaggctggagtgcaatggcatgatctcagctcactgcaacctccacctcccagtttcaagcgattctcctgcctcagcctcctgagtagctggtattacaggcacctgccaccatgcccggctaattgttgtatttttagtagagacggggtttcgccatgttggccaggctggtctccaactcctgacctcatgatctgcctgcctcagcctcccaaagtgctgggattacaggcgtgagccaccgcgcccagcccggaaggattttttaaattgcctaaatggaattatcggtagaactagacagaattcaggaacttttataatgtgtcccttatcccacttttctccaaatatgagtctctaacatcaacacatttaagtaataataataaaaaataatgattaagctcaactagcttttcttgagtgcttactgtatgccaggcattgtgctaattattttatatggataatgatactgaatcctcatgactcttcaccctttagaacttcaggacgtggaaacacaaaatccccgactttgggaggtcatttaacttaatcttctacttggtgtctgcggcctgtggctgctgtaacaaattaccaggaacttagtcatctaaaacaacacaaatgtattatccttctgttctgaatttcagaagttcaaataggctttcactagctgacaccaacggaccatctgattctctgccttttcggggtgttaaagctgtactccttgtaatcctgggttcacgactctgtcctccatcttcaaagccagcagcgtagcttcttcaagcctctgtttgcttctggcatcacatcttttattctttttcattattttggagagtcttcctctcttgcccacgctgtggtgcagtggcgtgatgtcagctcatgcaacctctgccttctgggttcaagtgattctcctgcctcagcctcctgagtagctgggattacaggcatgtgccaccacacccagctgattttgtatttttagtagagacagggtttcaccatgttggctaggctggtctcaaactcctgacctcaggtaatccaccctccttggcctcccaaaatgctggaattacaggtatgagccactgcgcctagcctcacatcttttttttcaaactccgattctcccgcctctcttttatacagacacacaatattatattgaaggccaatcttgacaacccaggctaatctcttcatcccaagattcttaatttactggcattttcaaagtctctcttgtgtttttgttacccttgtatacatagccttccaggcattaggttttagagacttggaggtggttatctttgatggacattatcgagccaactgccctgccaaagttaaatagaatccgtctccaatcacttctgatctggtccatttgggtaactttagtaatgaggaactcactacttgcttaaggaaaattcccagttttggcccctctccttaataatgcaattcaaaacaagccaaaggatttctcctggtgcagatgagagatgctaacacacttccactcaaatgtttctagtgtcacctccattgtctgagttgtctttcactggtctaaataatcaggccgggtgcagtggctcacgcctgtaatcccaacactttgggaggcagagatgggcaaatcgcttgaggccaggacttcgagaccagcctggccaatatggtgaaaccctttctctactaaaaatgcaaaaattagccaggtatggtagcgcaaacctgtaatcccagctacttgggggactgaggcatgagaatcgtttgatcccaggaggcaaaggttgcagtgagccaagattgcactactgcactccagcctggggtacagagaaagactccgtctcaaaaaaaaaaaaaaaaaaaagaaaagaaaatcaaatatttattggatgcttctatgtgccaagcactgtcctagttccttgccttgcataccagactttatgtaatgtttacaactctatgaccttgtccaaacagcacactcattttgaagatgatgaaacaagttcagaaggtgaagtcactcatccctaaagtgcagaggagtaactccagcagtggtgatcttaatcagtcacataaccgcttgtcatttgtgtcaatcctgtcctagtcacctagcatgcctctttcccattctttaaaaaacccatgtatgagagccaagctgggaccatggctttttggttcttttaagtaaagaccaaatgtcctggcagcgttcaagactccaagctgcctgtctcccgatgtctgatgagtaattgagcatcaccagtgtgtcagttgttaagttaaagaagcgaccaaacaggcctggtgtggtggctcacgcctataatcccagcactttgggaggttgaggtgggtggatcacgaggtcaggagtttgagaccagcttgaccaacatggtgaaaccctgtctctattaaaaatacaaaaattaactgggccggtggcaggtgcctgtaatcccagttactctggaggctgaggagagagaatcacttgaacccaggaggcggaggttgcagtcagccgagattgtgccattgcactccagcctgggtgacaggctgtcaaaaaaaaaaaaaaaaagaagggagcaaacatgcatggcttgcatctgagatctctttctgctggagcttggaatgcatgatttgccctggcttccctaacaaaaacacctgttttattttgttttgttttgttttgtgcccttgtccgctatattttctggccccttccagctaagattcacgaagagattaaccaggtgattggaccacaccggctcccaagggtggatgaccgggtcaagatgccctacacagatgtcgttatccatgaaatacagagactggtagacatcgtgcccatgggtgtcccccacaacatcatccaggacactcagtttcgaggttaccttctgcccaaggtggggttgcaccctcattgcctcccttccactgcactcctctctctccctggttccctacctctgtagcccaacactgatttctcctaactgccctcattttcaccccagggcacagacgtatttcccctgcttggctctgtcctcaaagaccccaaatacttccgctacccagatgccttctatccccagcactttctggatgagcagggccgcttcaagaagaatgaagcctttgtgcctttttcctctggtaggtttctctggtctgacttcctccaggcatgtgctaaatccacccccaagccactggtctgtatttgaagttcaagtcacagtgtgaatttgaaggttatatcatagaaccataaagttttagaatcccagaattagtaaatattaggatgtttgactctgataattagaaaaaaaaagttgggatggtaatagcactaaacagggcataaaccaactggctggctgttaagaacaaaataagacatattttctatttttccagccagatagtctctgaacctttgccattgatcaatgaaagcagccatagacaatatgtaaatgaatgagcatgtgtgtgagcctgaaaaactgtttacggacactgaaatttgaattttgttttatcttcatatatcacaaaagagtcttttttccccaaccattttaaaatgccaaaagcatcctagtttgcaggctgtatgaacacaagcagcagggcaaatttgcccaacagacactcatttgcctactcatgtcataaaatctttatgcagcaacattttaagtgtatgttggcatggcacagtggctcatgcctgtaatcccagcactttgggaggccgaggcaggtggatcacttgaggccaggtgttcgagaccagcctggccaacatggtgaaaccctgtctctactaaaaatacaaaaattagccaggcgtggtgacaggcgcctgtaatcccagctacccaggaggctgaggcacaaaaatcacttgaacccgggaggtgtaggttgcagtgagccgagatcatgccactggactccagcctgggtgacagagtacgaccctgtctcaaacaaacaaaaaacaacaaccaaaagtgtatgtcatttggaacctggagtcaggacagtggttgggaatctggactccactccatcatttagaaatggtggggtcttgggtgagtcacttcagcccccatctgtgaaacagagattaatccctccaaacaattggaagagtggcttataaacagtaagtgttattacgggtgagttttcactttttttcctcaccagtgtctggcacctaataggcatttgacaaacccttgaggaactgaaatgaacacaaccttgaaactcatggatcctatagaaccattccgtcttggaacgggatggaatcccagccatcagagaagtagcaggtcctagctgagcactaactatagatacccactaagcctgtgtaacacccctttataaagcagtcacagtcatgagccctgatgtgcggatgaggcagctgaggcccagtggggtggtcagtccagacacccctggcacccccatgacctgtgcaggtgcaacccttccttctgccctcccctgtgcctgcaggaaagcgcatctgcttgggcgaggccatggcccgcatggaactctttctctacttcacctccacccttcagaacttctctctatgctcgctggtgccacttgtggacatcgatatcacccccaagctctcaggctttggcaacatcaccccgacctatgagctctgccttgtggcccgctgagccacacctcctgcggggcaaggaggaagtggtgaagaatgcagctctcctctcgtgttcaggagcaccccctcttcctcatcttactaatcctcaagcatccctaagaggaggcactatgattacagagtcagccagggtcacctgagaatgtacagctgcgtgtcttcctctcccgtagaagagcaacgccctgtgcaagatttgcacctctgcctgcaggtttcatggtcacatggtcaccgttgcttaggtttctggctgcatcaaattattactgcagtccctgtgtcttcatgttgtccctttttgtgtgtgctctgattttgaccaaaatgtagtctaaaatcctttctccttggttctcatctttacccaccagcccccgaaaagtgaacaaagacctcaagtctgttgagcgtagcaagtttattgagtatggtgtgtgacagcgatgtagggcacagccaacagcttgaaatgtctttcttgacttgttatgagttatagtttctgccagctgctctccagtgacttcccctgggtaaaatgccccatcctcacccatcttgctgactcattacctttctccgccatcatctcttcttctaatcttcctttccagttgctctcagcacaactcccaattccaaatactccccagtccgtttgtttgtttggagatggagtctcactctgtggcccaggctggagtgcagtggcaccatctaggctcactgcaacctctgcctcctgggttcaagggattttcatgcctcagcctcccgagtagctgagattacaggcacgtgccactgcatctggctaatttttgtaattttagtagagatgggttttcgccatgttgcccaggctggtcttgaaatcctgacctcaagccatccacccaccttggcctcccaaagtgctaggattacaggcataagccaacgtgctcggcctccccactccatttttgaggatagctcagttatccccagcttctatcattccctttccagactccattaactgacaaaaacgttccctctttttcatttattcagccaatatttactgaatacccaacaagtgccagcgtagtcttcagggacttgggatccatcagtaagcaaaacagacaaaaactcctgccttcagggagctaacattctagtaaggaaggtggacaataaagcatacatgaaacaaatatgcaaatgacatactgcattagaaaagcaaggctggtaagtgggatatgcattctgtgattggaattgcaaatggatggttaggggtggtttcacaaggtgatggggcaacaagctatgaagatatctgggaagggagtgttcctggcagaaagattaaccaacagcagtggccgggcgtggtggctcatgcctgtaatcccggcacttcgggaggccgaggtggtcggatcgcctgaggtcaagagtttgagaccaccctggccaatatggtgaaacgtatgtctctactaaaaatacaaaaattagctgggcgtggtggcaggtgcctgaatcccagctacttgggaggctgagacagagaattgcttgaacccgggaagcagaggttgcagtgagctgagattgtgtcattacactccagcccaggtgacagtgtgagactctgtctcaaaaaacaaagcaacaaacaaaccagcagagtcctaaggcaggaggctgtgtgcatccaggaatccacagggagcaggtgtagctcgcatggaggaggaagacagagtaggagtgaaggaaacgaggccagggaggcgatggggaccagactgtgtggggtcttgtgggccaaggtgaggtcttggcttttaccctgagagtgattgaggtatttggagggatggtgagcagaggatgacatgtacagacatattttacagggctcacactagctatcatatgatggatacaaaagccaagacctattagcaggctactgcaactggtggtgttgactcagacccagcagcagcagtgaagctgggcagaatatggtagatttgaaatctgtttcactctctgagatggtggggtttgctacggtattgtatatagggtgtgagagaaagagggagttcaggcaggagtccaaggataggatctcatctttgatcacctcttcttcaacctgtcacctccagggaaccttgggacccatgacagtcagggttcctttttttttttttttttttttttagacagagtctcactctctcacccaggctggagtgtagtggcatgatctcagctcactgcaacctctgcctcctaggttcaagtgattttcctgcttcagctccctgaagtagctgggattacaggcacgcacaaccacgcctggctgatttttgtatttttagtagaaactggatttcaccatgttggccaggctggtctctatctcctgacctcaggtgatccactcatctcggactcccaaagtgctgggattacaggcttgagccactgcgcccggccagggttcctatttttaagcaatataaagtgactttggttattttaaatagaaaggctgttagctactggaaggtgattgtttagctcacaaaattaacagcaattctggaaaaatagggtaagaatatgagtaggaaaaagaggctgtggtaggggaccaacagccaaggtaatgttcaaagctatctggtaggacctgctgccacaccacccatctcctgggtactgaacacctgacccaccccctgggtactgccatgggactctagacccactgatgccactatagatgatttcctgattgtgtctgtgtttttgtctcacatcctcatgattaagagttccagacatctagccacatgttaaaaccttagggttcaaggtgaggtgaggaagaatgaatacctccttcagctgttgtagtgggaggcaaagccttgtccctgatcaagagccacacaataggaggtactcagaaaatcagaaaagagttttgagactgtgtgtataataaacaataaatgcggccaggcatggtggctcacgcctgtaatcctaggactttgggaggccaaggtgggcagatcacttgaggccaggagttcgagaccagcctggccaacacagtgaaaccccatctctactaaaaatagaaaaaaaattagccaggcatggtggtgcatccctgtaatcccagctactcaggaggctgaggcatgagaatcacttgaacttgggaggtggaggttgcagtgatagtgtcactgcactccagcctgggcaacagagtgagactgtctcaaaacaaacaaacaaacaaacaataaatgccattatatacattatgggaattagatcctccgggaagctgagatttagacggagttaggggtccatcattttattggagggaggagggtaatgcatgtgaaagaccaaaaaggaaggaagcagatgacactggtagcagaaaagtcttcagaacaggatgcagatccaacacttgtgaaagaaaagaaggaaggaaggaggattggacagagacaggccaagaccaccaggcagagataacagacccataatccagagaaaaatgctgttggggatggtttatgttggacagatagggtcatgccctggatcccagagtccttaattactatttggggcttccttggaaaagcatgggttccgctccacactgaggtgggtcctaatggtgctgcaactggagactctcagctcactgcccttattgaagctgattggaaagttctccatgaatgaagattcaagtagcacatccctatgcccaccacagacaccaacatacaaacccacatcattaaagccttggcacccccttctataaatgcagcatctcagagctacaaacacacctcgcaagtacacagtacaatgggcatcaaacatttttagctgtgaaacgttttttaaaatgatcttacttgcaaatagaatacataaagcaggccgggcgcgatggctcacgcctgtaatcccagggcgttgggaggctgaggcgggtggatcacctgaggtcaggagtccgtgaccagcctggctaacatgatgaaaccctgtctctaccaagaaaatacaaaaattagccgggcatggtggcacgtgcctgtagtcccagctactagggaggccgaggcagcagaattgcttgaacctgtgaggcagaggttgcagtgagctgagatcacgccactgcactccagtctggtgatagagcaagactgtgtcttaaggaaaaaaaaaaaaagaataagcaggagagagaattgttgatctctctttaggtaaagcacagaagagctataggtcctcaaaatagccttcatttctatttatgacgtgagcctattagaaagttcctagaggctggcgcggtggctcacgcctgtattcccagcactctgggaagccgaggtgggcggatcacgaggtcaagagattgagaccaatctggccaacatggtgaaagcccgtctccactaaaaatactaaaattagctggatgtggtggcacgtgcctgtagtcccagctactcgtgtggctgaggcaggagagtcgcttgaactcgggaggtggaggtggcagtgagctgagatcaaaccactgcattccagcctggcgacagagtgagattctgttaaaaaaaaaaaagttcctagaaattctgagaatctaagacattgtagttattcaacacacatcgggtccttccaaggggcccacggaaggacctaatgacataatggtgaccaggaaaagctcagtgactcaccacatagggctcacagcccagcagggaagagtgctccatcctttacagtgacggcccagcatagcccagcatagctctgatgaaggaagcacggagtagaatgtggaggactgtgatggaggaagcccaggtggattaggtaacaccaggaagtatgaggcaggttagagggaatccgtactcctgctatcccctggaagtaattcatttaattagagtaaacatttctcagaaactaggtgaatcaattttcttcctagaactaatcaagacctacaagtcagagaggacattttctttactgtgaggtttttttctttatatttgtttcttttctttttgaaaaagcctttattgatataacttacagatcataaagtgtacaattaagtgggtttgggtgtattaatcaatactgcaaccatcaccatggtcaattttagaacattttcatcacctctacaagaaacctcataccttctaggtcttaccccttttcccccacagtcaattccctgccctgagcaaccacgaatctacttttctttgtagattcactttttttttttttgagatggagcctcgctctgttgcctaggctggagcgcaatggcacaatctctgctcactgcaacctctgcctcccaggttcaagagattctcctgcctcagcttcctgagtagcttggattacaggcacccaccacgacgccaggctaatttttgtatttttagtaaagatggggtttcaccatgttggccaggctggttttgaactcctgacctcaaatgatcgtccggccttggcctcccaaactgctgggattacaggcatgagccaccatgcctggcctagattctctattcctgacttgcatataaattaagtcatatattatgtggtcttttctgactgcgttctttcactaatacttttttaaaggttcatgctagttgtagcatgaagttctgcttcattcctctttgtggctgaacgaaattgcattgtatggatatatcaccttttatttatcagtttatccagggatggatttattagcttcctagggctgcctaggaacctaggtacatataacaaagtaccacaaactgagtggcttaaaaaaacaacagaaatgggctgggcacagcagctcacacctgtaatcccagcactttgggaggctgaggggggcggatcacaaggtcaggagatcaagaccatcctggctaacacagtgaaaccccgtctctactaaaaatacaaaaaattagccaggcgtggtggtgggcgcctgtagacccagctactcaggaggctgaggcaggagagaatgggaggcaaggcggagcttgcagtgagccgagatcctcaactgcactccagcctggatgacagagcgagactccgtctcaaaaaaaaaaaaaagaaagaaagaaagaaagaaagaaaaaatcccatattctccacttattcatccctcctccctaaactcctggcaactactgatctttgtactgtcttcacagtctcactttttccagaatattatatagttggaatcacacagtatgaagccttttcaggctggcttcttttactgagccatatacatttaaggttcctcccagtcttttcatagattgatagctcatttctttttattgctaaataatattgtatggatgtaccacagtttgtttcctcattcacctgttaaaggacatcttggttgcttccaagtcttgcaattatgaataaagctgctgtaaacatttctgtgtaagattttgtgtggatataagtttttgtgtgtggatataaagctcatttgggttaataccaaagagcctgatggctgtatcacatggtaagaatctgtttaactttgcaagaaactgcaaatctgtcttccaaattagctgcgccattttgcattctcaccatcaatgaatgacagttcctgttggaccacctccttgccagcatttggtgatcagttttggattttagccattctaataggtgggtagtggtatatcattattgttttaatttgaaatttttagtgacatatgatgtggagcatctttccgtatgcttatttgctatgtgtatattttctttggtgaggtgtctgttcagatcttttgcccacttttcattgggttgtttgctttctattgttgagttttaacagttctttgtgtattttgaatgtaagtcctttatcaggtatgtgccctgtaaatatgttctctccgtctgtagcttgtattgtcgttctcttgacaattcttttgcagagcaatttgtaattttaatgatgtagaatttatcaattgtttctttcatggattgtgcttttggtgttgtgtctaagaagtcaccagcaaacacaaggtcatctagattttctcctatgttatcttctagaagttttatactcattttttatttaggtctacaataaacttggagttaattttcgtgaaagctgtaagggagcttctaagggggacacacactaacttatttgagagagggcaggtaattgtgaaactcttagctgggtcttacaacagaccctagatccatcaagagaacccaaccttcagaaacccatagtggaatgtttttcatgcatacatggggagagtatgcagtcatatgctcacatgcacaactgtacatgatcacacacatgcatatggtatgtcctgatccagagttctcccagcattctctcagaatgtttctctctgtcaatttcttcattaagcggtctcattgtgtccctgaactgactctcaatggacgacagtggccttacctggtagggggtgcaggctacaccctggtgcacaaagtgtgcttgagtaggtgagagtgggcaagtgtgcagtgaagccaggacaaccgccggccaggtctctggagaaaaccccaggacagggctgttcaggctgtgtgatgctatactaagctgtttgacttgaggaaggggtgctttttaagaatctgcccagagggttgtgttcaaagatttgctgggcacttatattctgtgacacctcagctacagacaactttctgagcctcagctttgtcatgtgtaaaatgggcatgaatgctgttcccctttgcagaggtttgtgggcattaagtgaggtgagcatgcaacggtttttgaacagagctgacacggaggtacttgttcaagaaatgagatgctattattactactctttgtagcatagtttaaggtttcccttcctctcatcccagctctgaaggacatcgtcaaggtgaactgagccccttctgtttcttctcttccccctaaccacctcgccccttcctttccccctgtcctgcccccattcttagccccgcccctcccgcaggcccgctcctggccccgcccttcctctgatcccgcccaccacgccggcaccagcacagccctccctcagcaaggcaagtagcacttggtgtagtttcgtgggattgtgacaaagcccacgtgtttgggggacacaacaatgtccttaggcgactgccgcgatttgaagcggaagttctgcatgatggtggtgaggtagagaaagagctccattctggccaggccttctctgaaacagttccgccttcctgaggaggagaggcgggaggggtggaggtgaagcccactcttagtgcagccttgccccgctacagacctccagctgcggctctcccagggaggaggggtggaatattatggcctgagagactttcagaggaggctctgatcctccctgagcctcagtttccttgagtgtacaaaagatgtacaaaagatggggtgatcgatgccaggtgtcacaatgggaggtttagatgccccttcccccagataacactcgcaaatatgactgctgtgccgtcatctcctttttagggatctgaagaatctgctgtgtgaccctagggaaataaatctctgattctctctgggctttggttttccccgcctctgaaaggggtatgatgtttcctttccttttgcctgggcacaggtactgggtgcttggtagttaagggagtatcagctggtggctcaacggtagattctaacaggaacttccaagctggggaaatactaggctacacggcagagaggggagctgggtaagggaggcccctgctggtgtgagtagtagcctggcagcaaacagtggtctcttactgatggagaagggcacaaaagcatcacgcttcttaaactgccccttctcacccaggaagtgctggggattgaagtcccgggggttggagaagaacctgaggtctctcagcacggagcccagcatagggaacacttctatgccctgggagggaggaggaaggtgtatgtgatgaggcgggttgggggattgttgagagtacacaggggctggagggggaactagggtgccccaggtgaggggaagtggcaggcatgggaattggggacctctgagggaggagccttgggggatagaagtttcacgtctctgagacaggaagtttgggagacatggggttcatgtcctcttaggcagggtgttcagggaacatgaaatttatgtccttaaagcaaaaaggcaaggggaaaggaaaaggagactcatgtcccttgggacagggagtttgtggacatggagttcattcctctccatgtggcaaaaattctgggggagatacaggattcaggagtctctgagagggaagatggaagggatgtggtggttcaaaaaatctttcattgagagagtgagacaggggctagaaagcttctcatggagatggggtgctgaggtcacagagagtgtgttggaagtcctaggctggtggggggacatgcagcaccttggagaggaagaaatcccgaaacttggtgtccttcttgaccctgcgggacacacccatggggagcaagtctccaaatctttggatctcatggatcactgcctctgtgtagagcgtcttggcccggtcctcaaacttgggctgctggttcttgccgatcactctgtcaatctcatggacctttgctgggggaggaaggggaatgcgtttaggtatctaggggtctcagagcagggatgatagcctgaataggtaaaacggggtggatgacttggctccgtgtatgacacggaggtagaccattcataacagatgtcagcaattagcattgttggcgcaggatcacgttaaccaggtcgtgccagaatcacaggggaggcacagggaggaattcaggggatgatccagaggagcgggcagcgggcactcagtgggcttgggacaggagtgactgaccaatcattgcagacattttcaatatttaaatagctaatgagactcagctgatgcctatcagctgaatattgccctgtctctggacagcaaggcacgtctcagggtcctgggatctgggacaggtggggactttgcaccaggctcaggggagttttgagggtctgggaccctccacttcccttcccctccagccttaccctccacctctgggtgcttcatgagcagcaggaagccgtagtgcagggtggtgctgacggtctcagtgcccccaacgaagaggttcaacgtggtcagcaccaggttcttcaagtagaactctgtgttggggttcttctcctcctgcagggagagggggctttaggccaacctcactcctcttgccctcaaggcatgccgccacatctggctaatgttttaaaaaatttgttgtaaagattatatctcgccatgttgccctggctggtctcaaactcctgggctcaagcaatcttccttttccagccccctaaagtgctgggattttggtgggagccactgcaaacagcccagattattatttatttatttttatttatttattttttttttgagatggagtcttgctatgtaacccaggctgtagtatagtggcatgatcttggctcactatagcctccacctccccagttcaagaagttctcctgcctcagcctcacgagtagctgggattacaggcatgcaccaccatgcccagctaattttggcatttttagtagagatggggtttcaccttgttggccaggtcggtcttgaacgtcctcctcagcctccaaaagtggtgggattacaggcgtgagccaccgcgcctggctgaggcccagattaaaatgtttaaaaaagtactctttatgcagattcaccttaacattttaacccattcccaatatgacttgttctattctatcaatcaatcatctatctatcttactctgttttatgctactataacaaaatactacagactaggtaacatatttatttatttttttgagatggagttgtgctcttgttgcccagactggagtgcaaatggcatgatcttggttcactgcaacctctgcctcctgggttcaagtgattctcctgcctcagccttcagagtagctgggattacaggcgcctaccaccactcctggctaatttttgtatttttagtagagacagggtttcaccatgttggtgaggctggtcttgaacacctgaccttgagtaatctgcccacctcagcctcccaaagtgctgggattacagacgtgagcagtagcacccagtctacttataaagaatacaaatttatttcccacagttctggagactgggagtccaagatcaaggagctggtaggttcggtgcctggtgaggatcaggtttctgctttcaagatggctccgtgctgttggatcctccaaggggaggatcactgcgttctcacatggtggaaggtggaagaccaagagaggtgaactccatccatcaagcccttttgtaggggtacctaatcccattcatgatgatggaaccctcatgacccaatcacctgtcataggccacacctcccaatactgttgcattggggattacattccaacatggataaaaaacattcaaaccatagcaatatctatttagtactttttctgaaccacttagggtaaattacatacaacataggttttacctctcaatactttggagagtatctcctaaaaatggggacattttctgatataactgcagttacatttatcagctatagtaaatttaacgttgatgcaatactttcatccctgaggtttatattccaactgttggtttgagaagtaatttgacaactttgaaacgaaatggtagtttctttgttgcctgagtgatgccacacttaagactcactcatggttcagcgtggtggcttattcctgtaatcccagcactttgggaggctgaggcaagaggattggttgaggtcaggagtttgagaccagcccatgcaacacattgagaccctgtcattaccaaaaacaaaaacaaaaaagaaaacaaacaaacaaaatacacaaagaaaaaaaaagactcacatctaagtttccagaggcatctcaacagttaatggcaagggccctggatccagggagctgggctttgatcctggctctgaatgctatcagaaaagtgacgttgattaagttatgtgatctcttcatgccttggtttccccagtggtaaatggggataattttagagatacgtggtgaaaacatttataggtgaattgatgcaaggtctggcattttcttcaaaataatcccaatttgaggaggaggttccaagatggccaaacaggaacagctccagtctgcagctcccagcgtgagtgatgcagaagatgggtgatttctgcatttccaactgaggtactgggttcatctcactggcacttgtcagacagtgggtgcagcccatggagcagggcagggcagcgcctcacccgggaagtgcaaggggtcgggaaattccctttcctagcaaagggaagccgtgacagatggtacctggaaaatcaggacactcccacactaatactgtgcctttccaatggccttagcaaacggcaccccaggagattatatcccacgcctggcttggagggtcccacccccatggagcctcactcacaggtagcacagcagtctgagatcgaactgcaaggtggcagcgaggctgggggagaggcatccgccattgctgaggcttgagtaggtaaacaaagtggccaggaagctcaaactgcatggagcccaccgcaggtcaaggaggcctgcctgcctctatggaatccacctgggggcagggcatagctgaaaaaaaggcagcagaaacttctgcagacttaaatgtccctgtctgacagctttgaagagagtagtgcttctcccagcatggagtttgagatctgagaacagatagactgcctcctcaagtgggtccctgacccttgagtagcctaaatgggagacacctcccagtaggggcccactgacacctcatacagccaggtgcccctctgagatgaagctttcagaagaaggatcagacagcaaaatttgccgttctgcaatatttgctgttctgcagcctccgctggtgatatccaggcaaacagagtctggagtggacctccagcaaactccaacatgcctgcagctgaaggtcctgactgttagaaggaaaactaacaaacagaaaggatatccacaccaaaaccccatttgtacgtcaccatcatgaaagaccaaaagtagataaaaccacaaacatggggagaaaccagagcagaaaagcggaacactgtaaaaatgaaagcgcctcttctcatccaaaggaatgcagctcctcaccagcaacagaacaaagctggacagagaatgactttgatgagatgagagaaggaggcttcagacaatcggtaataacaaacttctctgagctaaaggaggatgtttgaacccatcacaaagaagctaaaaaccttgaaagaagattagatgaatggctaactagaatgaacagtgtaaagaagaccttaaatgacttgatggagctgaaaaccatggcatgagaactacgtgatgcatacacaagcttcagtaactgatttgatcaagtggaagaaagggtatcagtgattaagatcaaatgaatgaaatgaagcgagaagagaagtttagagaaaaaagagtgaaaagaaatgaacaaagcctccaagaaatatgggattatgtgaaaagaccaaatctacatctgattggtgtaattgaaagtgacgcggacaatggaaacaagctggaaaacactcttcaggatattatccaggagaacttccccaacctagcaaggcaggccaacattcaaattcaggaaatacagagaatgccacaaagatactcctcgagaagagcaaccccaagacacataattgtcagattcaccaaggttgaaatgaaggaaaaaattctaagggcagctatagagaaaggtcaggttacccacaaagggaaaccgatcagactaacagcagatctcttggcagaaactctacaagccagaagagaatgggggccaatattcaacattctgaaagcaaagaattttcaacccagaatttcatatccagccaaactaagcttcataagtgaaggagaaataaaaccatttacagacaaacaaatgttgagagattttgtcaccaccaggcctgcttacaagagctcctgaaggaagcactaaacatggaaaggaacaactggtaccagccactgcaaaaacatgctaaattgtaaagaccatcaatgctaggaagaaacagcatcaactaatgagcaaagtaaccatctaatgtcataatgacaggatcaaattcacacataacaatattaaccttaaatgtaaaagggctaaatgctccaattaaaagacacagactggcaaattggataaagagtcaagacccatcagtgtgctgtattcaggagacccatctcacgtgcatagacacgtatggctcaaaataaagggatagagaaagatctaccaagcaaatggaaaatgaaaaaaaaaaaagcaggggttgcaatcctagtctttgataaaacagactttaaaccaacaaagatgaaaagagacaaaggaggccattacataggtaaagggatcaattcaacaagaagagctaactatcctaaatatatatgtacccaatacaggagcacccagattcataaagcaagtccttagatacctacaaagagacttagactactacacaataataatggaagactttaacactccactgtcagtattagacagttcaatgagacagaaagttaacaaggatatccaggaattgaactcagctctgcacaaagccgacctaaaagacatctacagaactctccaccccaaatcaacagaatatacattcttctcagcaccacatcgcacttattccaatattgaccacataattggaagtaaagcactcctcagcaaatgtaaaagaacagaaatcacaacaaactgtctctcagaccacagtgcaatcaaactagaactcaggattaagaaactcactcaaaaccactcaactacatggaaactgaacaacctgctcctgaatgactactgggtacataacaaaatgaaggcagaaataaagatgttctttgaaaccaatgagaacaaagacacaacataccagtgtgtctgggacacatttaaagcagtgtgtggagggaaatttgttgcactaaatgcccacaagagaaagcaggaaagatctaaaactgacaccctaacatcacaattaaaagtaccagaggagcaagagcaaacacattcaaaagctagcagaaggcaagaaataactaagatcagagcagaactgaaggagatagagacacaaaaaacccttcaaaaaatcaatgaatacaggaggtgggtttctgaaaagatcaacaaaattgatagactagcaagactaataaagaagaaaagagaagaatcaaatagacgcaataaaaaatgataaaggggatatcaccaccaatcccacagaaatacaaactaccaccagagaatactataaactcctctatgcaaatagacttgaaaatctagaagaaatggataaattcctggacacatacaccctcccaagactaaaccaggaggaagttgaatccctgaatagaccaataacaggctctgaaattgaggcaataattaattgcctaccaaccaaaaaagtccaggaccagagagattcacagctgaattctaacagaggtacaaggaggagctggtaacattccttctgaaactattccaatcaatagaaaaagagggaatcctccctaactcattttatgaggccagcatcatcctgataccaaagtctggcagagacagaacaaaaaaagagacttttaggccaatatgcctgatgaacattgatgcaaaaatcctcaataaaatactggcaaaccgaatccagcagcacatcaaaaagcttatccaccacgatcaagtgggcttcatccctgggatgcaaggtgggttcaacatacacaaatcaataaatgtaatccagcatataaacagaaccaaagacaaaaaccacatgattatctcaatagatgcagaaaacgcctttgacaaaattcaacagccctttatgctaaaactctcaataaattaggtattgacgggatgtatctcaaaataataagagctatttatgacaaccccacagccaatatcataccgaatgggcaaaaactggaagcattccttttgaaaactggcacaagacagggatgccctctctcaccactcctattcaacatagtgttggaagttctggccagggcaatcaggcaggagaaagaaataaagggtattcaattaggaaaagaagtcaaattgtccctgtttgcagatgacatgattgtgttagaaaaccccactgtctcagccccaaatctccttaagctgataagcaacttcagcaaagtctcaggatacaaaatcaatgtgcaaaaatcacaagcattcttatacaacaataagagacaaacagagagccaaatcatgagtgaactcccattcacaattgcttcaaagagaataaaatacctaggaatccaacttacaagggatgtgaaggacctcttcaaggagaactacaaaccactgctcaactaaataaaaaagacacaaacaaatggaagaacattccatgctcatggattgcagtaatcaatatcatgcaaatggccatactgcccaaggtaatttatagattcagtgccatccccatcaagctaccaatgactttcttcacagaattggaaacaactactttaaatttcatatggaatcaaaaaagagcccacattgccaagtcaatcctaagccaaaagaacaaagctggaggcatcatgctacctgacttcaaactatacttcaaggctatagtaaccaaaacagcatggtagtggtaccaacacagagatatagaccaacagaacaggacagagccgtcagaaataataccacacatctacaaccgtatgatctttgacaaacctgacaaaaacaaacaatggggaaaggattccctatttaataagtggtgctgggaaaactggctagccatatgtagaaagctgaaactggatcgcttccttacatcttatacaaaaattaattcaagatggattaaagacttaaatgttagacctaaaaccataaaaaccctagaagaaaacctaggcaataccattcaggacataggcatgggcaaggacttcatgtctaaaacaccacaagcaatggcaacaaaaggcaaaatggacaaatgggctccaattaaattaaagagcttctgcacagcaagagaaactaccatcagagtgaataggcaacctacagaatgggagaaaatttttgcaatctactcatctgaccaagggctaatattcagaacctacaaagaactcaaacaaaattacaagagaaaaacaaacaacccagtcgaaaagtgggtgaagttccccttcctgtgtccatgtgttctcattgttcaattcccgcctatgagcgagaacatgcagtgtttggttttttgtccttgcgatagtttgctgagaatgatggtttccagcttcatccctgtccctacaaaggacatgaactcatcatgtggggtggggggaggggggagggatagcattaggagatatacctaatgttaaatgatgagttgatgggtgcagcacaccaacatgtcatatgtatacatatgtaacaaacctgcacgttgtgcacatgtaccctaaaatttaaagtataataaaaaaagtgggtgaagatatgaacagatacttctgaaaataagacatttatgcagccaacagacacatgaaaaaatgctcatcatcactggccatcagagaaacacaaattgaaaccacaatgagataccatctcacaccagttagaatggtgatcattaaaaagtcaggaaacaacaggtgctggagaggatgtggagaaataggaacacttttacactgttggtgggactgtaaactcgttcaaccattgtggaagacagtgtggtgattcctcagggatctagaacgagaaataccatttgacccagccatcccattactgggtatatacccaaaggattataaatcatgctgctataaagacacatgcacacctatgtttattgtggcactattcacaatagcaaagacttggaaccaacccaaatgtccatcaatgatagactggattaagaaaatatggcacatatacaccatggggagggatagcattaggagatatacctaatgtaaatgacgagttaatgggtgcagcacaccaacatggcgcatgtatacatatgtaacaaacctgcacgttgtgcacatgtaccctagaacttaaagtatatatataagaagaaatagagaaagtacatgctttctctatacacttacatgctgtatgtaagtgtcatacagaggtatgctctgtaagacacttacctcagcatatacagttaaaccctttttctatgtggttattgagaatttgactagtggtgttaattatgggtagccaccggtactgatcagtactttttgtttattcctatttttccaggaaccatttgttttacacattgttctctgtattactcatatttacccagagagaaaaatatatcactataatttgtaaaattcatatgtttaatggaaggagcaaaactgttctccacttattacaattatttttgaaacataaaaaaagttgtgaagatttcatcttaatatggacatttatctgttctcaaataatacttttataatttcttatgcctgtctttagtatcttaatcctgttatcttcagaagctaaggatgtgtgtcacctcaggacctctgtgataattgtgttaactgtacaaattgattgtaaaacatgtatgtttgaacaatatgaaatcagtgcaccttgaaaaagaacagaataatagtgatttttatggaacaagggaagacaaacataacgtctgactgcctgtggggtcaggcaaaaagagccatatttttcttctttctttcttcttgcagagggcctataaatggacgtgcaagtaggaaacatattgctaaattcttttcctagcaaagaatattaatattaataccctggtaaaagtatgcgttcctggggggaggtctataaatggctgctctgggaatgtctgccttgtacagttgagataaggaccgagataaaccttggtctcctgcagaaccctcatgcttactagggttgggaaaacttaaccctggtaaatttgtggtcagactggttgtctgctcttgaaccctgttttctgttatttaagatgtttatcaagacaatatgtgcaccgctgagcatagacgcttatcagtggttctgcttttgccctttgccttatgatctttgttggacccttatcagtggttctgcttttgccttttgtcctgtgatctttgttggacccttatcagtggttctgctttttgctctttgaagcatgtgatctttgtacctactctctgttcttacaccccctccccttttgaaacccttaataaaagcttgctggtctgagacgcaggtgagcatcatggtcctaccaatatgtgatgtcacccctggtggcccagatgtaaaattcctctctttgtactgtctctctttatttctcagctggccaacacttatggaaaatagaaagaacctatgttgaaatattgagggtgggttctcccaataataatacagacatgaaaaacatttgatggaaatccaacatccattcctgattaaaaattatcagcaagctagaaataaacagaatttcttaccctgactaaaggcatctacaaaaatatctgcagccaacatcatacttaaaggtgaaagacttgatgctttccctctaagattgggagcaagtaaagaatggcggttcttaccactctgattcaaaatcgcgctggaggttctatctattattccactctctaggtccatgtgtacacattgtgtagcacccacttacgaatgagaacatgtgatactttctgtgcctggcttatttcacttaagataatcacctccagttgtatccatgtggctataaaagacaagactttattcctttttatggctaaatagtattcaatggtgtatatataccacattttatttaaccattcatctgttgattccctatctttgctattgtaaataggatttggaccacatttcaagtacttaattagtggccacatgcagcaagttactaccatattggacaatgtagcctcaacccactatatgaccttgggtaagacttgcaaactgtcactgcttcaatctctccatctataaaatggggatggcaacaatacctccctaaaagggtaaagactgagtcactgtgtgtaaagcacttcatgcctccccactggtgcttcaccctggggctggaatgagcacccaatcttagcgtcagatgacacagcacagcaggaccctggtccttgggtcagaaaagtccatgctggcacctctccagtgtcaggaaagtacagcttccacctcataaaaatcaggattgtttatcttatcctcctgggtcaaagtaacttctgggctcagggtaaacactgagtcactgtgtgtaaagcacttcacgcctccccactggtgcttcaccctggggctggaatgaggacccgatcttagtgtcagatgacacagcacagcaagacccaggtcgttgggtcagaaaagtccatgctgcctcctctccccggtcaggaaagtacagcttccacctcttaaaagtcaggattgtttgcttctcctgggtcaaagtaacttctgggctcagggtaaacactgagtcactgtgtgtaaagcacttcacgcctccccatcggtgcttcacgctggggctggaatgaggactcaatcttagtgtcagatgacacagcacagcaagacccaggtccttgggttggacaggtctgtgctggcacctctccagggtcaggaaagcacagcttccacctcttaaaaatcaggactgtttgtcttctcctgctgggtcaaagtaacttcagggtcaggatcctggatccagcaaagagtttggttaacattgcaagaaagatgttgcctcatggtcaaaagtcaggcctaggatgagacaggcagacacggacacattcacatccaaattgtgcaaatatggactgaccctgtcagaggctgtgtgggtgcaggctcacagtgaagatagagacatatgggagtccagtagacatcaatcaaactggacccagtttccacacacatggagctcaagagtctccagggggaaaacagagacataaagttagagagagatagagccagagaaatttcctgcaccaggaagatagttgggaagaaccccctcagcgctagttagagtgatcagaaaccaaggggacccgatcactgcacctgccagtctcagtttctgtctccctccaactgaccacctcttcctctgagactcactggttctgcatttcttgcccctccttctgtttctcccatcacttccacctatggctgtcacagaaggactgataaaggaggggacactggagatagaccctgagcattgaaggcggccagcccccccacacctgtgggtatttctcatcaggttggacgagagactgagaaaagaaataagacacagagacaaagtatagagaaagaacagtgggcccaggggactagcgctcagcatacggaggacctgcactgacgccggcctctgagttcactcagtatttattgatcattatttttactatcttagtgaggggagtgtagcagggcaacaggttgggagaaggtcagcacagaaacatgtgagcaaaggaatctgtatcatgaataagttcaaggaaacgtactgtgcccagatgtgcacacaggctagatttatgtttctctttacccaaacatcttagtttagcaaagagtaacagagcagtattgctgccagcatatctcgcttccagccaccgggtggttttctcttatctcaatagaatgaatgggaatggtcagctttacaccaagacattgcattcccagggatgagcaggagacagaagccttcctcttatcccaactgcaaagaggcctccctctttcactactcctcctcagcacagaccctttatgggtattgggctgggggacagtcaggtctttcccttcccatgaggccatatctcaggctgtctcagtggggggaaaccttggacaatacccaggctttcttgggcagaggtccctgtggctttccgcagtgcattctgtccctggttaatcgagaatggagaatggtgatgacttttaccaggcatactgcaaacatattgttaacaaggcacatcccacacattcctaaatccattaaaccttgattcaatacagcacatgtttctgtgagcacagggttggggctaaagttacagcttaacgcatctcaaagcagaaacaatttttcttagtacagatcaaaatggagtttcttatatcttccttttctacatagacacagtaacaatctgatctctctttcttttccccacaagcgtctgcaggcttccaaagagaggggctaggagatgcaccaacacagaagcacaaatacaccagcacacacagatacacacaattggttcacatattgctaggttacagtttgctatgcgacaaaggcagtggaccagatttgattgaattgaacaattccttcttttcatcagcttctcaattttttttttgagacagagtattgctctgtcacccaggctagtgtgcagtggcataatcctggctcactgcagcctccacctcccaggttcaagtgactctcttgcctcagcctcccgagtagctggaattaaaggtgcccaccaccacgcccggctaatttttgtatttttagtagagacggggttttgccatgttggccaggctggtctcgaactcctaacctcaagtgatctgcccaccttagcttcccaaagtgctgggattacaggtgtgagccactgcacccagccagcctcccaattttgaacacacactaccaccacctccacaacacacaaatgtaaatgcactttcatatatgaaactgtataaatacaaggaagctccacacgtgcaaggatatacacataagcacccccagattcaaccacagaaacacacgcctgcacatttgcataaatacaaacaccactttacatataaaaatcatataagcacatacacggatgcaagcaagcatggagaaatgcacggaagcataaacaaacagacaaagctaagtaaaaaagtgtgcatgctcacctgtgcttacaaaaatacacatactcatacacaaacacccacacgttcacatgcttaggtggactttgatatctctaccactgtatccctgccaacatctagagagtggataagggataggcattaggtcgctgggttgcctaagcaggaagtctgggttccctaacacctttttctaagctaatgctccttgacgataatgagaaaggaggcggggaatggatgaagtttcataactgagtgaagaggcaggttcaggataaaaggcccagttagaggctgcagtggggtgcagggcagtcagactggaaccatggagctcagcgtcctcctcttccttgcactcctcacaggcctcttgctactcctggttcagcgtcaccctaactcccatggcaccctcccaccagggccccgccctctgccccttttggggaaccttctgcagatggacagaagaggcctactcaaatcctttctgagggtaagacacagacgaatggggtctgagggtgggctgcttcttgtctctgtacttggggatccttcaccaaacagaatgaggcagacttccagagtcaggggtggcacggggatggttggtgagtacagagcatagtgaagcatgatgggtggtagtattaggagaaaaacatcagtcaaattaaatttagcagagtttatttgagcaaagaagtgactcatgaatcggacaactccctaaaccaggagagacaccacacggcagtatgggcaagcagtattcacaggcagaaaaaggaggtgacatacagaaacagcctggctggccacagatcacagcttgccttacttggtcacagtctgaggagctagcagcctgtggtggactgaaagcccagctgctctgattagccaacatttggctacttgtcgcaagaatctattcatctgggccgggtgcagtggctcacgcctgtaatcccagcactttgggaggccaaggcggtggatcacctgaggtcgggagtttgagaccagcctcgccatcatggggaaactgtgtctctattaaaaatacaaaaattagctgggcatggtggtgtgtgcctgtaatcccagctacccaggaggctgaggcaggagaatcacttgaatccaggaggcgaaggttgcagtgagcagagatggtgccactgcactccagcctgggcgacagagcaagagtccatctcaaaaaaataaaaataaaaaaaagaagaatatactccctcccaagttaggttgcagttcactctatgcagagagaactttatgtcaaatttaatttaattaaacaattctccccttttgatgagcctcaaaattttgagattgaccaaaaccttgggcatcaacattacttctgtcaccatcataatggacttgtttgctctcagtatggaattcacaatggacaatgtcaaagtagttgagtgattctttgttttcttcatgtttttgttattcatactgtaatgaagccattggatgtacaaagaatggctgcatatgagcatttaagactctctctcttttttttttttttttgagacagggtctcactctgtcacccaggctggagtgctgtggcatgatcatgtctcactgcagcctttacctcccaaggctcaggtgatcctccgcctcagccccccgagtagctggaactataggtgcatgccaccacgcccagctactttttgtattttttgtagagacagggttttaccatgttgcccagactggtctcaaactcctgggctcaagcaatccacctgcctcggcctcccaaagtgctagccattgcacaggtgtgagccattgcacccggccaagactctcaagaaaatacaacacatcagggagactgttatgatggctctcaggagggtaatacaaagaaaatgaagtctgtaccttaccgggagtctccatgaaccaaactgatcaaaatcgaataattcaaagctcaggcaataaagatagttcaatagtattagagtccaattggtcatatactttgttcagagcacaatggtgattaaggactagagcttgctataaaataacttgatttacagaggcatttgtttttgtagttcacctggtaacacatgtcatagtaccttggagacccactagaagaaacattaagagtagaaaaccttgtgataggcttgctgtattagtccattctcacagttataaagaaatacttgacactgggtaatttataaggaaaagggatgtaactgactcacagttccacatggctggggaggccccaggaaacttacaatcatggtagaagttgagggagaaggaggaaacttacattcatggtggaaggtgaaggagaagcaagtaccttcttcacaaggtggcaggagagagagagagagagagagccaagggggaagagcctcttataaaaccatcagatcttgtgagaactcactcactatcacaagaacagcatgggggaaactgcccccaggatccaattacctcctagcaggttcttccctccacatctgaggattacaattcaagatgagatttgggtgaggacacagaaccaaaccatatcacttgccatcaccattcaggatgcttgcaaatcaactgttacctgcacccgtaaatacatatcttctttttcccctgagaattttccttagtgtatttggtggcagtgtctagagaaacagcattgtcagccacattttaaattaagttatatgtactagtaaattcacgggaaagataagaacaatatttggttttgttcagcaccatacacaagcctccaagatgggcaaagaggagatctaaaactgcatgatgttccattaagcgtttttgtttaatacaatgttctcatcctccttttggagagtggcttctacccatctgaactccttggaggttcaattggctacataatccaagatgtcccttaatgtataaattagcctcagattccatacaactgtcaccccaatatcaccaaaagtgagcacccagggactccattggaaccttttctctgcagaaaccaacttatcttcatcgactttgaggttgatagtaatttcagttattgactgttttggcttttaactgtgggaggtattagggaactctcaaggaaaaaatttggaaagcagcagtgagctaggccaaatagcaagttacgggccagtgaggagaaagaacagagtaagcgaacctcagcagacccaaggtaggcacttgtggggttggaaaagagggtcacctactggcattagagcagatatcagttaaatttgtttacacataagtctgcacagctcttgaacaaggtgggaagctcactttttttgtggtctctttctatcatgctgcaagggtgcatagccacatttagttggaaagagactttactgtatttacttatttatttatttaattattttttatagcgttggggtcttgctatgttgaccaggctggtctcgaactcctggcctcaagtgatcctcccatctaaatctcccaaagtgctgggattacaagcacgagccatcatgcctggccactttaccatatttaattcagtaacattacacatgcaattaaccgtacccacataggtagtccccaggtcctatgcgggatgcctggaagcacaatatgctttttgcagccatcattcagatacattttctatatttggtagtgattatattattagttagttaatagaatgttattacatactgttattgtattatattaactaataactagttattagttaatagtatgttattacatactgttattatattaaataactaataacataaccactatcaaatatttccagtgagtgcaaaaaagcaagtggcaattgatgtctagaatatcaagatatagctttccactcctcctttggggtttccgggtgattcccattgggaacacaaagaggcattggcgccagtgaaattatttcctgattttggggaactggctcacaaactcaacaattgcttgtcttttttcctagggtataagcctttgctaaagccattcacagattattgtactatggattttcttgtaaggaaagggaaagggttaggacagcaagaaacagggaagaaaggataaaagataatgctttcatgatggaagagaaatcttgatccacagtcttggaaaagctgtccacatataagatgccaactgcttcttgggaaaaactttcctggtcagctttgccttaaggtctcaacagacataaagttctaggagtctagaaggacccttttcaattgagagatgtggatccaagatcccagaccctgaagttttgctacagagaagaacttggcattgtcctttgcaatggagtacaaggacagtcttagaagaacctggtatggttacttccaatggagttcaaggacagtttctctggtgtcatttccaaagagcccaacctctaaattatagatagtgaaaggtctggttgtcatcaactgatgggtcatcaatgactccttttacctggtgaaaacatgccttggcataatgtattaaagccttgcattattgaatcatatcagagtttataagagtgggagatacatgagattctattattggggcataggacttcctattactattttacaagtgatctatctatgtctttccaataggagtggatctgattgccgtcaatcaataatacctttgaccaagggactccaatcaattcagcatgctttgcctaatgccttttgtttgtaatactgttgcgggacaatcaaagactggagagaccaaaaaaggttcaggagagtttattaaattaaggtgaccactggctcagccagaaatatgtccagagagtctgagccccgaacaaagggctttgcctgcttttaaacatcttaaggtgggaactacatgaggtgggaagcaagttacagaagggagaaacaaagcagttaattaacatttcttacatcttaagaaagacatgtgttgcaacctaaacttatcagtcttatgaccctgcagccatgcaggaactcactgggcctgtaataaactttaaggaatgtggagttgggaagaagagataaggtccattgtccacagagagaagaaaggttgttaatattctcttttaacttgaatgtaaggtgggggtcacactttgcagcaactttaaaaggattttaaaatttctattactactactattaggttatagttgatttcattaattccttcttcaataccttatttaagtattttaccacttctctagtgaagcaagtacctctaccactggagagttctccaggaatgccaagtaaggaaatacattttctaataacattttagctactgttatggcattgatctttgtgcataaaaaagctttaatacaaccagaaaacatgcaatgaaggtggcagttgaattaactccatcttcaagtgttcaaatgatctaccaagtcccagaaatatatcacctgtggtttttggtttttgttgtcttactagaattatggatttgataaatcaaatattagttataaaccattagaacagtcacctcatcaatattttttcataatttggatcattttatctcttctatgatgagtcgtggaatgcagagcttttagtaatggaaattttaagaactcaggaaggatcaggcggccatccagtgtctccatgagtgcatgcttcacactggaattacagcctcttaaatacaaattttaataccataagtaccaatttatgcttctccaattcaggtacataacactggtttattaaataggttatcataggtaatttgatggtgccattgcactccagcctgggtaacagattgagaccctgtctctgaattggaactgcacgggggcactgtccttggaggggtgagtgggcatgacgaggtgtctgggtatgagccacaggtgtagaatttcactcttctctgccatcctctgttacatcctgggtacctgcctgccactgaaagaatgaggtaaaagaggtggtggcacgaatcaaatagattttgctgtgccaatgagagagagcagactagcccatgtcagtgccaggagagtggaggagagagggagagcagcaaaggagtgtgggtagggagtgctcatcaacagtacacatagtgccctataccggtaactgccactggctcagtatttacctgggttatcactgcttaccatgcctgattttatgattaattatctacttatcattactaatcaatcaacccactttccaatgggagaattagaatactgacaataccttccccttccccctctcatgttgaccatactcctgaatcttaggcttgttatccttttgctattaatagagtttttttatttctgatcaatggtctttttactgatagagtaaatatgcatatatacagagtatatatgccaatggtactatgaattttaaaattatttgcttagacagaatatgtggacatacaaatgatgaatgtgataattgtcatacatatatatttatcttagacacttagtcaaaacatgtggtttttggttatgagttagacactgtcactttagctggaagatacaaagtaattgggtcatagactctcaaattatggaacacttagatttttcaggggaatgacatggagggagccaaggagtcttatgattaggtaaaatattgtttgggtggctcacgaccccactgggcaacactcaaagatgtggtggcttatgcctgtaatcccaacactttgggaggctgaggtgggaggattgcttgaagccaggagttcaaaaccagcctgggcaactgaacaagaccctgtctccacaaaaattttttaaaaatttagccaggcatggtggcctgtgcctgtagtcccagctacttgggagactgaagcaggaggatcacatgagccccgcagtttgaggttgcagtgagctatgatcacgtcactgcactccagcctgggcaacagagcaagaccctgtctcttaaaaaaaaaatcatctgcagtgtgaggagtgacaacatttaggaaagtgtgcataggtttaaattctggtcaaagacatcctacacaattcactgaaccttctctttaagggttttttctaaactctgcagacactatctggagaccaatcatgcctctattaacagaatttgctgctccttctagctcttggtatctcactgccccctttctttatgagagctggcatggtcattgaatatcccaatcctttacaaattctgaaacaagcaaaactgtcaatgaaattcatatttgcctaaaatgagttttcaaaaggatctttgtggctatcttgttagttcatagaaagtggaggcttgtcaggaacgatattgaatttttcatttaaattgttttagagacagggtctcagtctgttacccaggctggagtgcaatggcacagtgatagctcactgcaaccttgaactcctgggctcaggagattctcccgccttagcctccagagtagctgggactacaggtgtgaacgaccatgccccactatttttttttatttttgtagagacgtgttgggggagggtctcactatattgccttggctggtcttgaactcctggcctcaagcaatcctcctgcttcaacatcccaaagcattgggataagttttgaatagacatgtttgaccctctccccttcttcgttgcagcaaagatttccattttctcacagggagggcttggggtaaatagtttgttttgttgttgttgttgttgtttgaggatgtgggtgggtcatcttggttaatgtcagtgcaagaacagtgtccgttcctcattattggggttccttagccatccaggcaagcagtagctcccttgagaagacttcctgacccccaggtccccaccataggctctcatacaccagctgcccctccttactgagcctatgtccttgacaatgctgcatttacttgtgatcctgtggctgatctctccctcacacttccagacaaggaaggcctgcgaggactcaccacagagctgaacatagtgcctggtacacaataggcgtttagcaaatatgtgtatagaaacaaatgaaggagtcagtgagtgaaagctccaagcctgactcagcagaactgacagtcggccggggcctgcaaagtgctaccaggcccccagtagggggtcgcagatctaaggatccctccccaccaaatagagtcccatcacataggtgaaggtctcaagtgcctattgttttcttttcatcattttccatgtgtcacgagaatatcatgctatcatgtgaatcaatggacttagttttcccactagagtaatgtgtctgggaattacctgtgttgtcatggggattttctaggtgtcatttacaactacctgtggacaaggtgaggtgctaccctcatcttagaagtagggatggtggccgggcatggtgactcatgcctgtaatctcagcactttaggaggctgaggcaggcagatcaactgaggtcaggagttcgagaccagcctaactaacatggagaaaccctatctgtactaaaaaaacacaaaactagctggtgtggtggcacatgtctgtaatcccagccactcaggaggctgaggcaggagaattgcttgaacacaggaagcggaagttgccctgagccgagattgcaccattgcactccatcctggtcaacaagagtgaaattctgtctcaaaaaacaacaacaacacaacaacagcaataacaaaaaaacagtagggatggagatgctcagcctggggaaagcacttgtccagtggcacacaactaggaaaaggagaagctgagctccagcaggaggtctgtctccaaagccctcctagactaaagctgcttaacattttgtggattatgaaatcctctgagagtttgattaaagctgtggccccctcttttccaaataggcacatacatgtttgcataaagttgtgaggcttcacagactccctaaaactctttcataaaccttccaagggtcctctaggtattcatgaccgtctattatgattgcatctcttgggggtaggggaaagagggagggcatgagcaagtgtgtgtcaaggctgaggaaggtggcgctgttgcttctccatttcccaataagcttccagattccttttggagccagagggatgcgggctcgtgtctcagattcaattcttatgcgttgagtcacagttttctcttctgtcaattaagaccatgacaatgagaatgtgtgcccctaaggtggttgtgagaattaaatgggatattgcatgcagctagtatataataagtgctcattaaatggcaactaccttgatccactcattcatttattcatgaatccaataacaattcactgggcactttctatgtaccaggaaatattctatgaattgatgatgtggcatcttggacaagacatacgaggtaacactgtgcttatggacattccattggtggagacagataagcaaaaaataaacagataaggaaatgttaggtggacaagagctacgattaaactaaagcaggaggatatttcagaaagtgatggagaactacattagattgagtggttagggaaagactccgccttgctttgtttcttagcagggaccaggaaagattcaggtggaaggtgccagaaggaggcagggtggttgcaagaatcctgaagcaggaaaaatctcagggaacaacatggaggaatcagtgggaggagaagtcagagaggtgatggggccacatcatgtaggaccatgtcaaccacaggtggagacttcagatcttattctcagcaaagttggagtattggaggccttggtgagcacagggatattaattattttacattttagtggggttaccctggcttgtggggcagtgaaacagttgttaaggggtctaagaatgtaaggcaggagaccagtgaaggggctttgcagagatcaatgcagggcatttgtaagtaaacttaaacatttttctaatttttatgtcaagtttttattgaaattgaacatcactataaaaagtgcacagctcaatgaattttcacaaactgaacatactcatgtaattgacatgcaggccaagtagcaagagtcccccaaaacaccacaccccgtccttttctagtcactatccacctaccatcttgatcatgggttgattttgtctgtgtttgaacttttttttcttttttgtgagatggagtcttgctctgtcacccaggctggagtgcagcagcgtgatctcggctcactgcaacctccacttccccacgctcaaggaattctcttgtctcagcctcccgagtagctgggactacaggtgagggccaccacgccagactaatttttgtatttttagtagagacggggtttcaccatgttggtcaggctggactcaaactcctgacctcgtgatcagcccgtctcagcctcccaaagtgctgggattacaggtgtgagtcaccatgcccggccctgtgtttgaacttcatacacataaaattatgatgcatggactctcttgtgtctagttgcttccactcaacattatgcctgtgagtttcagccacgttattgcatgtagctgtagtttgttctttttcgttgctgtatactattctattgtgtgaactctcactgtttctctatatctgtgttgatgagtattttataaagaaagcttctgtgaatatttgttcattttttggtgaacacacatacacatttgtgctgggcatgtacctgagagtgaagtggatggtttcccagttatccatttgttcagcttcaggaaatactgcccagcggttccccaagtggctgcacagtaatcccaccttatccaccggagatatgttctgagacccccagtggatgcctgaaaccccaaataatgctgagccctatatatactctttttttcctatacaatcacattatacagggagggtggtatacacagtgcagacggggtggacaaagggatgattcatgtcctgggtgggacagagtggatgatgagagacatcatcatcctacttagaatggtgcacaacttaaaacttacaaattgcttatttctggaattttctatttaatattttcagactgtggttagctgcaggtaactgaaactgcaaaaagcaaaaccaggccaggcgcggtggctcacgcctgtaatcccaacactttgggaggctgcggtgggtggatcacgaggtcaggagatcgagaccatcctggctaacgtggtgaaaccctgtctctactgaaaatacaaaaaatcagtcaggcatagtggcaggtgcctgtagtcccagctactcggaaggctgaggcaggagaatggtgtgaacccgggaggcggagcttgcagtgagccgagactgcaccactgcactccagcctgggcgacagaccgagactccgtctcaaaaaaaaaaaaaaaaaaaaaaaaaaaaagcaaaagcaaaaccacagatcataagaagtatggggtgagggtgatattcgtagtattttatcaaccatctctactgtttagggcagcagccaattagagcagaccctggctgggccaccaattaacctaagcttgtccaacccaccttattttgttgttgttgttctgttttgttttgtttcagtctttcagcagcctgaagccatggttttcagattttgtctctagtaatatacagaaaagaaggatgaggaaggggttttactggcccaatcagaaacagaaactaagaacctatgactgtattctctcccttggacaccgttaactgttaacccttacttgctggatcctggcaggggaaagggcagcctggggaggcggatgttgaggaggggctaattaccaatctggtatgtaagtattttgatagttttacaaatgaggtgtatgctgactaacagccacccctggtgtggatgtgattggcagttccgagagaaatatggggacgtcttcacggtacacctgggaccgaggcccgtggtcatgctgtgtggagtagaggccatacgggaggccctggtggacaacgctgaggccttctctggccggggaaaaatcgtcatcatggacccagtctaccagggatatggtgagggcttcagaggcactgggagggggcaggtgggggtgcatcagggaagggagtatatggggggaagaaggactcagagccttcttccaacttcttctgcaaccaactcacacctcccctgcactgcaggcatgctctttgccaatggaaaccgctggaaggtgcttcggcgattctctgtgaccaccatgagggacttcgggatgggaaagcggagtgtggaggagcggattcaggacgaggctcagtgtctgatagaggaacttcggaaatccaagggtgagtcctgggagacgaataggaaagaaaggcaatgaaacactgagagatgcaggcacgggaatagaaaggcagagaggtatacatgggcagagacagagacagacgaaaccagagacatgatctgacagaggtatagggacagagagtgagagagacaggggaatagagagggacggggattggcaggagagaaacagagccagggaaagagagagatgccaggtgtataatgtccaaaagttactcaaagaggctggatgcgatgactctcacctgtaatcccagtactttgggaagcaaacagcctgggcaacataatgagatcctgtctctacacaatataaaaaagaaatgagccaggcatggtggtgtgtgcccgtagtcccagctacttgctatggtgggactacaggatcacttgagcccaggaggttgaggctgcagtgagctgtgattgtgccactgcactccagcctggacaacagagcaagatcctgtctcagacaaacaaacaaagaaacaaacaaaccctgaaagacatatattttcatggatcaattgtgtctatcgaaggcaaaatcagaagttatgtaaaagaaagcaaagagataaaggaaaaaactacagacatttaacaaataatgacctgtgttttccttgccctgggtgaagtgctgatgagctggcagtgagcaagcaggccaggtgggatgttctgcccgggtgcagctggaggggtcatcaaagaatcactaggttatttttgagttctccataactgggtgtctgtgggacatgtaggtgacgggtctctggctagtacctccatctcatttatgccaggtgtttaccatctctcttatcaaaatttctcaagagactctgggacgtaaatgcagaggctgcgtggggaggtagaaacacaggagctataggcaaacagggacaagaagactgaagagaaggacaggaagaaacagagtgacacaggcaggaggaaagagacagatggagggaccaaaacaaagagatatatagactgggcatggggctcatgcctgtaatcccagcactttgggaggttgaggctggtggaacacctgaggtcaggagttcaagaccagcctggccaacctggtgaaaccctgtctctactaaacatacaaaactagccacgcatggtggcacgtgcctgtaatcccacctactcaggaggctgagactggagaattgattgaccctgggaaatggaggttgccatgagctgagatcatgccactgcactccagcctgggtgacagagtgagactgtgtctcaaaaaaaaaaaaaaaaaaaaaaagagagagagaaatatacacacagagagacagaaagaaacaaaggcaaagagaaattgaggcagaaaaaattagaggagagacagacagacaaggctcaagaaagggtctgcagaggaatgagagaagacaggcaagtgagacccagagagaggctgcactaacctgacattcttgggtgctcacagaccaccctccctccagctggggccagtgctgagcctggtgtatacaggtatcacttaacaagtgcagaataatgcccggatgactggagagccctagatgtagaaagaagagattatgggggagtaacaggtgggggtagaaagatggttttttatttgttttaaattagggacagggtctcactctgtacccaggctggagtgcagtggcacgatcatagctcactgcagcctcaaactcctgggcccatgtgatcctcccacttcagccccctagactccttcaactgggactacaggcatgtgccaccatgtctggctacatttttaacttttttgtagagacaggttctccttatggtgcccaggctggtcttgaattcctgatccttttgcctcaggctcccaaagtgctgggattagaggtatgagccactgtgcccacccagggctttttaatttatacaagcaattgattaaacacctactctgcccagcccctacccctgggatttagctgtattcactcccagagtcagaggtggggccggagaggaggtgcagagtgagaaccggctgcatggactcgatagctgtgttgcctgggtctaaatcctggcctcaggaatgagtagctgtgcaactttggtcaaattactcaacctctctgtctgcccatctataatttggagctaataatcaaattgcatctgcctcacattgttgtagtgagagttcagtggaattacacgtgacgtgctggtacataattagctgttatggttattctcatgtttaccattactgagtgatggcagacaatcacacagagataggtgacagcctgatgttccccaggcccttcagtctgtgtccttgacctgctgcttcttcctaggagccctcgtggaccccaccttcctcttccattccattaccgccaacatcatctgctccatcatctttggaaaacgcttccactaccaagatcaagagttcctgaagacgctgaacttgttctgccagagtttcttactcatcagctctatatccagccaggtccaggagagggagaaggagagggagggtgggggtgaggtgaacatccaggacacacgagaaaaggatgacctgacttgggggctcagaaatgcagcttatccctggaagaaatgcagagaccacgtggagtcagggacatggagacctggagggaggggaggcggtgagacagggatagagacagtgagagagagaatggggcacgatggggaggcagaaacagagtcagagagagactgagagaagaaagatgagcaaaaacaagacaaagaagggcagagatcaagagatcctgagagacagagttgatgagaatgaatgtgaaagagagggagagagagaatgaatcaggctttgggcttgatctctgctcttctgctcctggatgtctttttttttttttttttttttttgagacggagtctcgctctctcagccaggctggggtggagtggtgccatcttggcttactgcaacctccatctcctgggttcaagtgattctcctgcctcagcctcccgagtagctgggactgcaggcatgtgccaccacatctggctaagattttttttttttttttttttgagatggaatcttgctctgttgcccaggctggagtgcagtggtgcaatctcggctcactgcaacctccacctccctggttcaagcaattcccctgcctcagcctcctgagtagctgggattacaggcacctgccaccacgcctagctaatttttttgtatttttagtagagacagggttttgccatgttggccaggttggtcttgaactcctgacctcaagtgatctgcccgccttggcctcccaaagtgctggaattacaggcatgagccactatgtccagcctactcctggttcttctgtatgcttgcttctctgtctttggtaaagctcctcacctgaagaaattcaaggatacaagacaataaggaacagcatttcttcattttctcccattgctccttctccctgtttttttttttttaaaaaaaaaaactttccacagattataaaggtaatcttctgctcttttaaaagaaaataataaaatgtctccttattgattaacctggaaatatgcctattacatattaaatttaagaatatcaagctgcagaacagtatgcatagctgtagtttgttgttgttgttttcagacagtatcttgctctgttactcaggctggagtgcagtagtgtgatctcaactccctgccacctccacctcccaggttcaagcaattctcatggctcagcctcccgagtagctgggactataggcgagcgccaccacacccagctaatttttttgtatttttagtagagatggtgtttcaccatgtcggccaggctggtcaacatagctacagctcttaagcaggggtgtatgttggattcacatgtggggttgtcacagttatggattttcaggaccctactttccaggcggtctgatctggaaagtctgggatggggtccaaggtgagtacttgtaacaagcccgaccaataattctaatgttctcctcccaccgagaaccacagagaaaagtctggaaggagacccaccagacagttaacaatggttatctctagaaggagagattaagaaggaattttacatcgcaatatacgtttgcatttttgcaattatttgcaataaattaggcattccattcttcatcaaagtaatagaaataacctccaaaatacatagtcctaacatgtcagcaggcttatcttgtgtaagaatcattttattaatgtctgacacagcaagggagatgaggagaggagggaagagggagagaaaagtatgagaaagacaaataaacaggccgaggtagacaatgggtgacacagaaaggaagtgagacagagactaagagagatagaaaggagagaggcagggagatggggcagaggccaagaaaaagacagaaggatgagggaggaagatgcagaaagaggtaaatgtgagatagatcaaaggagatatagagtcagtgagtgaggggttcagaggcagaggggagtggggaagtggggttcccatggagggattggggcccaggaggcgctctctccctgtgacctgctagctcagccctaggcaaacctcaccaccccttctttcttgcagctgtttgagctcttctctggcttcttgaaatactttcctggggcacacaggcaagtttacaaaaacctacaggaaatcaatgcttacattggccacagtgtggagaagcaccgtgaaaccctggaccccagcgcccccagggacctcatcgacacctacctgctccacatggaaaaagtggggtctgggagaggaaaaagggaagggaggggagggagggcaagatagagaggtgagaagagggagggaaaaggggtagggaaggggaagatggggagtgaagaacaaagattagggaggggagaatagtgaaaaggaggagagcagatgaggaaggaaagaaagatgaggtgaaaggaaggagaaaataggaggaactgagatggagagagagtggtggtgggaagtgggggagagagagagagggagagagaagactggctgaggaaggaatttggggcaagagacaaaaatacagcaacaggagaaaagactcacggaggtagaaagagactgggagacaaaaagagagaaacacatcaaaaagatgtggagagagatagaaacagagccaggcagagtaaaaagaggctgagagagatgagttagagatgtgcagctggacatgtagaggacagagaaaagcaaattgggccagataatgtcaaagaccttcaggcaaacggagggcagccagggagacaggcgtgtgcacagcaaggctacagcctctcctgaccctgccctcccctccctactgtggacgcaggagaaatccaacccacacagtgaattcagccaccagaacctcatcatcaacacgctctcgctcttctttgctggcactgagaccaccagcaccactctccgctacggcttcctgctcatgctcaaataccctcatgtcgcaggtgggccagggacagccagtcaagggggtcttctggactgcagaaatggggctatgggtaccacctggatgagagaggggatgctggcttcctattccgggatcactgtaggctctggactagcttccaatcaagccaattctgttggtggatgcatggacgcatgaagaatctgtccatgcgttctcccattgttttcttccatcactcaaggatcttttttttttttttaagacagagtcttgctctgtcacccaggctggagtgcagtggcgcgatcttggctcactgcaagctccacttccaggtttcatgccattctcctgcctcagcttcctgagtagctgggactgcaggcgcccgccgccacacccggctatttttttgtatttttagtagggatggggtttcaccatgttagccaggatggtctcgatctcctgatcttgtgatgtacaaatttagggagtacatatgcagttttgttatgtgcgtaggttttgtaatggtcaagttagggccgttagggtatttatcacccgaacagtgtacattgtacccattaagtaatttctcatcattcacctcccccttctgctccctcgctcttcttagtcttcactgtctgttgttcctctctctgtgtccatgtgtacacattttgtagcactcacttatgagtgagaacatggaatatttgactttctgtgccatgacttaaaaattgatccgttcatccacttatcttttcatctattctttgtttaatttattaattaaagaatgtgtactcactgattttttcatttatgattcatccaaggacatatactgtgtcattcatttatttggattacttgatccacaagttgatcctttgaaacagtgatatgttgatggacaatttgtcattgattcattggttcatttattcattcattcatgcattcttccatccttctatgaactaggtttcacccttatccttccatcagtcagtctttcaattcacccttaatccatccatgctttccttcatttatcacaataattcactcatttattcacctctgatctatttatcattcaatccagccattcatttattcctttatttactcatacttcactaatttacttattcacttgttcttccataaatctagccattcatgtgattattcattaattgggttcattgatttctttgtctatggaccattcattagtgattaattaatcaatcaatccatctattaattggtaagtaaatatatacatccatttattggtttgttcatttcttcatcaatctttccttccatgaattgatctattgattgattgattgatgtttttatccagttgttcatggattcatctattgttctattacactgttatatacctgaggaccaagaatagtgtctcacctataatatacacacaataaatattagtttattttctactcatcttagagagggtgttttgatttgtggcctggagttcttaatctgaaattccatgcaaaatcgtgttatgtgtgtgcatatgtgtgtgtgtacctgtgcatgtgggaagaggatccataatagtcattagatttcaagcagtgagaattcttgttgcttccttcctgctctcctcaccccacgctgattgctttgaggagtatcaaagatctaagcctttactgtaggtttttaattggtcaatagaaagtagtgtccctgctgaaaggtctctttttaaaaaattttctttccttcttttttcttttttttaattttgagacagagtcttgctccgtcacccaggctggagtgcagtggcatgatctcagctcactgcaacctccacctcctgggttcaagcgattctcctgcctcagcctcctgagtagctaggactacaggcttgcaccaccacacccagctaattttttgtatttttagtagagatgggattttgccatgttggccaggctcatcttgaactcctgaactcaagcaacctgcccacctcagtctcccaaaatgctgggattacaggtgtgagccaccatgcctggcctcaaatgcctctttaaaatgagattcattcatcttcttctctgtgcagagagagtctacaaggagattgaacaggtggttggcccacatcgccctccagcgcttgatgaccgagccaaaatgccatacacagaggcagtcatccgtgagattcagagatttgctgaccttctccccatgggtgtgccccacattgtcacccaacacaccagcttctgagggtacaccatccccaaggtaagactggctgcacccccacatccctcctgtgtgggcatcctggattttcttaatccccaaactcaaccttttgttagcttctcaattgagtccccttgtttttgtttttttctttttcttttttgtgctgtgtgtgtggagggtgggcagggaatggcaatatcttttgatcttgtgatccttcctcaggacacggaagtatttctcatcctgagcactgctctccgtgacccacactactttgaaaaaccagacgccttcaatcctgaccactttctggatgccaatggggcactgaaaaagaatgaagcttttatccccttctccttaggtaagctggacccacagtttctttcccagacaccagagggcaggtcctatcctcaacttgagaaaaaaaatgacaggtccttattaattgagcacttaatatattccaattgcttcacctgccttatccccttccatcttcactacaaccctgtaaggaggcttgagaaagaagatgacattcccaaaggcacatctgggcaagcaggaacttgggcaagtattttaacatctctaaacctcagtgaattcattttcttaaaaagaaaaaaatctgttgagcaccgctgtaagcccagtgctgtactaggggctgaagacaatgcatcaaacaggtcacacggagacagggttcctgccccaggaaatttaaagtccagcagggaagatggacattcatcaaataataataaaataatcatctcatgaaatgaatgaatgcctgcaacatgcttggaactgcctggcacaaaggacatgctcacggggcaattattattataattagacataattgtgataagtgctctaaagggagctttgggagcacaaaataggaaatagtagctaatcttgtggtgggtcattaaggaaaagcttaccagaggaactggcttccaagccgagatgttcatgggtgggcgtcaatcaatgattgcaaagtgtgttccaggcaaaggaaacagcaagggcaaaggctaaaggtggaaatgtgatggtaccattgagaatctataggaagtccagtgagccttgggtgtagattgcggaagggaataagacaaagggctcagctgggcaggaccttgaaggctgtggaaggagtttggatttatggtctagcactggggaggtggagaaggtcttgacgtgctctgacttgtcccagttctcatcctccactctttggctggttaagagaaaaactttaggcaaattaaacttagcagagtctatttgagcaaagaaacaattcatgaattgggcagcacacggaaccaggaaaggttcagagagctccacccagcaatgtgatcaggcactatttatccatagggaaaggaactgaggtacagaaacagcctgattggttacagctctgtgtttgccttatctgagcatgtctgggcagcttgtagcctgtgactggctgaagcttggctgccctgattgtccaaggttacttgttacaagaatatactctcaagttacattgcagtttgtttacatgttgagttacgttacagtttgttatgcagggaggctgctttaggccaaatttaatttaatttaacacgcaccatccatgaaaggccccagaaacaaatccctagtcttgagtttcatcagtgacttcagcaacccagggtcctggcccagcccctggttttgtgcagtacagtgacctccttccacattttatcttcaatgacagttaggaacacatggggtgatggcttgagggtcaatgtcttctctcaattttgctgtcttgtttttttttttttttccttttttgagacaccgtctcgttctatcacccaggctggagtgcagtggcacaatctcagctcactgcaagctctgcttcctgggttcatgccatcctcctgcctcagcctcctgagtagctgggagtataggcacctgccaccatgcccggctaattttttgtgttttttagtagagacagggtttcaccgtgttagccagaatagtcttgatctcctgatctcgcgatccacccgcctcagcctcccaaagtgctggaattacaggcgtgagccaccatgcctgagacattatcttaaggtttctttttttttttttcttcagacagggtcttgctctgttgccctggctggagtgcagtgtcatgatctcaggtcactgcaacctctgcctcccaggttcaagcgattctcctgcctcagcctcccaggtacctgggactacaggtgtgtaccaccatgcctggctaattttttgtgtttttagtagagatggggtttcaccatgttagccaggatggtcctgatcttctgacctggtgatattccttcctcagtctctcaaagtgctgggattacaagcgtgagccattgtgacaggcctgctattttgttttaagagaggcagagatgtagggaaataaggacagagacagataagtaacaaagataataagattgagaaacatagttggggacaaagagggaacacactgagagatagagatggggagacagtggcagaaggacagacagcaggtgaacatcaggcagtatacggagaggaagagagagagacacacacagagagagccacataaggagaagaggaggaggaggaataagaggagagggaggaggaaaaggaaggcggaggggagaaggaaggagggaaaggagagaaacagaataagagataggaaaaagagagagtgacacaagaagagaggaagaaagaatgaaggagacaaataaggtatctttagagggagatgaaaagaaagaaggagagagagagagattggggagcaatcagattcaaatagatggagataggaggttaagcaagatggaagaaagccaaaaaaggagaggaaaagaagaaaaactgtgtctgacaggtatagacagagaaaaagacaggagtagggctgccaggggcagaaagaaaggtataacccaagccaaaagggtactgcagccaaagaaattcgaaaggtgtccaaacagatggccccagagatggggagggcgtgatgagagggagataataagcatcaggctgttgtggaaaatgttaggtcacacaaagagctacagaagaacaggcccagagacctgcctgtttctaagctcatgttgcccaacttctggatgtgccaaagggacatggacccatttccagacacctccacatagacacacttgtccaacaacttggcaggcatagggaatgcctgaaaactcacacttgacatggcctttccaaggtttgcagattatgaaacactgaagtgaagggaaaggctccctttgtctctgcctcagctttttccagctccctttgttctcatttttctcccaatctgtggtttagaacctactgggggttccttgcacctctgagaatcggtggaagccatagaccctccctgtctcatatgcatcagtcccattcacaatttatatacaatttgggttttttaccccctgagctcttgaagcctgtggatctcaggctgagaccagaaaacagcctagagacacagacacagacacatggccagaaacacataccccacagatacccccagaaacaaacacaaggcgataaccaaaccttaaggctccttagcagaagccaagtgctgttctaagaatttttacaattgtctcctttaacctcagaagagccctttgagagaggtgccattctccccgtatgagaagtgaacactaagaatgttgtcataaatgtgctcacacacatgtagaggtacacacacacacacacacaaccagaagtgggtcattatacactgtggggatcaccaaaccctttggaactgtaacagaagctacaaactctctactagaaaaatgaacatggcgccgggcgcggtggcccacgcctgtaatcccagcactttgggaggccaaggtgggtggattacctgaggtcaggagttcgagaccagcttggccaacatagtgaaaccccatgtctactaaaaatacaagaaattagccaggcgtgggggcaggtgcctgtaatcccatctacttgggaggctgaggcatgagaatcgtttcaacaccctgagaggcagaggtcgcagtgagccgagatgtcgccgctgtgctccagcctgggtgaccgagagagattccatctcaaaaataaataaataaatacataaataaataaataaataaataaagagattgagagagagagagtgagagcgagagcgagagcgagagagagagaaatgaacatggcacatccattcaaagatttgcacctggtttcagagcagcttcctaaaagtccaccctgaattgtaggttaaaggccagtcttatgcaaatctcttgcagtggacatacatgtctgggcttagggacatggcagagcgaagtgtatgcacctgccctgtgcccatgctggtgaccttctgtgcccacagggaagcggatttgtcttggtgaaggcattgcccgtgcggaattgttcctcttcttcaccaccatcctccagaacttctccgtggccagccccgtggctcctgaagacatcgatctgacaccccaggagtgtggtgtgggcaaaatacccccaacataccagatctgcttcctgccccgctgaaggggctgagggaagggggtcaaaggattccagggtcattcagtgtccccacctctgtagataatggctctgactccctgcaacttcctgcctctgagagacctgctgcaagccagcttccttcccttccatggcaccagttgtctgaggtcgcagtgcaaatgagtggaggagtgagattattgaaaattataatatacaaaattatatatatatattttgagacagagtctcactcagttgcccaggctggagtgcagtggcgtgatctcggctcactgcaacctccacccccggggttcaagaaattctcctgcctcagcctccctagtagctgggattacaggtgtgtgctaccatgcctggctaatttttgtatttttagtagagatggggtttcaccgtgttggccaggctgatctcaaactcctgaactcaagtgattcacccaccttagcctcccaaagtgctgggattacaggtgtgagtcaccatgcccggccatgtatatatataattttaaaaattaagatgaaattcacataaaataaaattagccattttaaagtgtacaatttagtggtgtgtggttcattcacaaagctgtacaaccaccaccatctagttccaaacattttctttttttctgagacggagtctcactctgtcacccaggttcgagttcagtggtcttgaactcctgatgtcaggtgattctcctagttccaaatgttttcattatctccccccaacaaaacccatacctatcaagctgtcactccccataccccattctctttttcatctcagcccctgtcaatctggtttttgtccttatggacttaccaattctgaatatttcctataaacagaatcacacaatatttgattttttttttaaaactaagccttgctctgtctcccaggctggagtgctgtggcgtgattttggttcactgcaacctccgccttccaagttcaagagattctcctgcctcagcttccaagtagctgggattacaggcatgtggtaccacgcctggctaattttcttgtatttttagtagggacatgttggccaggctggttgtgagctcctggcctcaggtgatccacacgcctcagtgtcccagagtgctgatattacaggcgtaatatgtgatcttttgtgtctggttcctttcacgttgaacgctatttttgaggttcgtgcctgttgtagaccacagtcacacactgctgtagtcttcccccatcctcattcccagctgcctcctcctactgtttccctctatcaaaaagcctccttggcgcaggttccctgagctgtgggattctgcactggtgctttggattccctgatatgttccttcaaatccactgagaattaaataaacatcgctaaagcatgacctccccacgtcaagaggtgatctgtgccattttgtgtgtgattcttttattgtcaggtccctagggatttttctggaaggaatgttggtgagaacgcctccctcacctcagtgacaactctgtgaagggccaaaccattgtcttgctcgtcactgtactctcaatacagcatgtggcatatgacaggtgttcaaaatatttggtgaggaatgaatgaatgagtggctaaatcagccacccactacccccacagcccacagaaaatggagctaggctactccatcagactgtgtctcctccatatcccactttcttctttggcccagaataaattatcatccccaaagggcccaggatgcccccagttctgcctgccagttactctcaatcccctgtgctgcaatgccaccttttgataaagcttagcgctattcttgaagtggaaccactctaaattcagcctccaggctggacacggtggcttatggctataatcccagtactttgggaggccgagtcaggtggatcacctcaagtcagggggtcgagaccagcctgcccaacatacagaaaccctgtctcaactaaaaaaatagaaaaattagctgggtgtggtggcacgcacctgtagtcccagctacttgggaggctgagacaggaaaatcgcttgaacgcaggaggcagaggttgcagtgagccaatatcccaccactgcactccagcctgggtgacaaagcgagattccatctcaaaaataaataaataaataaataaatacaacctccacatattccaccagcaggaccaccacccttccctgagggagttgttgcaagtttaatatctttatcgcaaggatacatcagccagcctgtggccaatgggaagctggttctgggactcagccctgagatgctaaccttttggcctctgcagcacctgccagctttaggctccttgtagcctctgaagagttagcagggactctgcctgtgcaaatgcatggcacacattccctcaccaaccacagaaataaaacaacaaacagagaaacatgtcttttaagagtgacagcagaatctgcccggcttatttcacctaacataacttcctgcagttccatccatgttgctgcaaatatcaggatctttttcttttttaatggctgaatagtactcccatctgtatgggcaccatatgaacacttaggttgattccatatcttggctgttgtgaacagagctgcgaaatacatgggagtgcagacatctcttcggtatacagatttccttttattggaatacacttagcagtgggattgctggattgtatggtagctcgatttttaatgtttttcttttttgtttgtttatttttattttattttattttttttttgagatggagtcttactctgttacccaggctggagtgcagtggtatgatcttagctcactgcagcctctgcctcctgggttcaagccattctcttgcctcagcctcccaagtagctgggactacaggcacccaccatcacgcctggctgattttgtatttttagtagagatggagtttcaccatgttggccaggctggtcttgaactcctgacttcaggtgatctgcctacctcagcctcccaaagtgctgggattacaggcataagtcactgcgcctggcctatttctacttttttttttaaggaaactccatattgttcctcaaagtggctctactaatatacattaccaccaacagtgtacaaaggttccatgggggattctttcagattgagtggtcagagagggcttctttgagaaggcttctgagagttggccatgagaaggtgtggtgagaagccttctcagctgagggaacagcaaggtaaaaggcccggaggtgagaaagcaaacttggcaccttccgggagcaagcaggcattgcctctgataatgtttcctcctggtaaaatgacagctctgggagggcagggttcttatttcctatctatctatctatcatctatctatctatctatctatctatctatctatctatctatctatcatctatctatcatctatctatctatcatctatctatctatctatatctatctgtctatctaatcacctatctttctatgtatctatcatctatgtatctatccatctgtctttatttatttatagagtcagagtcttgctctgttgcccattgtattagtccgtttttatgctgctgataaaaacataccttagactgggtaatttataaagaaaaagaggtttaataaactcacagttacacatgactggggaggcctcacaatcatgctgaaaggcaaaagtcacatcttacatggcgctggcaagagagagaatgagaaccaagtgaaaggggttttccattataaaaccaacagatcacatgagacttattgactagtatgaggacagtatgggggaaaccacccctatgattcaatgatctcccaccgggtccctcccacaacatgtagggattatggcagctacaattcaagatgagatttggatggggacacagcaaaaccatatcacccagactggagtgcagtggtgtgatcatggctcattgcggcctccaactcctggattcaagcaatcctcccatctcagcctcctgagtagtgaggactaagtttgtgataccacctctggctaacttttaaatattttgaaaggatgtagtcttgctattttgcccaggctggtcttgtactcttggtctgaaatgatctccccatcttgacgtcccaaagcactgagattacaggtgtgagccattgcacctggcaggttctcatttacttaattattactgttgtcatggtttgctttggtccctgtgggttcccccaccctccagaacaagtgcctgacatatagtagggttcacaataaatatttgtggagtaaataagagctgagccttcaagggatccaaaatacttgcatggagtttttctaggtgggtacaatgccacccagctgcatgactatttcagggtgttcattggctcctttgggtgatattttgacatctatataagaactcccacttctccaaatctgggggccacatctttagagttctcagcttcccgtctgtcaggaatgaaggagataatatcactgattggagccagattgtctggatgttgaatcccagctccttgctggtgcccttgagaagtgacttaagccctctgtgtgccttatttctgcctctgtaagcagagatcatcatagcacctctaatgtggggctgtttgaagattcagtgaggtatgtgcaaagagctttttgcacttccaaaaagtgtctgggatatcattgtgcactgtaagaatgcactgtaacaattatcattgagtcttcttgttgggattaaaagagatcaggtctgtcagggcctggtacagaagtggtatcagaaaaataatgacgtgccggctgctcacaaggcttcccaggccaagctggtgtgggaaagagagtttctggagtaccagatgagttggtctcccctatgtgagacacccatggggagccatgggcggcctctgaggagaaaagtctccttattgtctttatgtctttatgctcccagagcatacctgctcagcggcattccacaggttgctcagggagataacacttccttaaagcagtgaagtacaatcaaacatcttggcttcttctgaaacccactcccacccatttcagtcctgataagattttaagtagtttagacacacgcctttgctcaaggaaattcacagaaactgccactgctctacatcttattgaataactcacgagttctccttcattgattaatcctttttctcatcccttccttgccttctcatctgccctaagaacaaagagcttgtaagccaataaattaggcagagccaaagagctctgggccatgagcaagcctctgacactctggtcccccggacccaccttttaaattctcactctgtttctttctaactctttagtctccgttggactcgcggtacctgcagggtggtgtggggctggtttccccaacatctggcgcccaacgtgggactccccgttatctctacaaataatctggtgaaggaatgctagagcatggaaagtggaagatgacagaaaaagggtgcctgaatatgttttcacttcaagctctgtggataagtagtgtgcttggagaattccacggtaacctcgggaaaacgggtcaggctgagagtaaatttgctaattacttaagcttggtgtggcagttattgtgccacagaggggcaattgtgagtacccaaaatctcacatctttgttccagctcatagaaaagtattccccttggttcccggaatatggaaccatgaatgtaaaagactgcgacaagttcggagcagacttaaaatgagcacaacaagagggctacaatattcccttgtctgcttggtctgtgtggtcagcaatcaaaataccactggagcctttccacactgaggaggatgagaagtttcaggatgacatagaaaagtttaataatcaggagtttgatgatctgcaaagtgaaccatcacagtttagttttaaaaagggggagaaagggatatatgctaacctccaaaaacttatagaagaaacatttccacctactgcagaaacagtgccacccactgcgcctttaggggaaggtccagaatggccacccccgcctcagccttatgaatttttggaatgggagcctgagacatgacttgctgctcccattgttgcatgccccacaattaactatgttgaagggaagcttcaggctcacccaacagccaattatggtgagggaatgatccaggcttgtccaccttttaattatggtagaggaatgctgtgagcaggtccaaatacaaattacggtgcagggacaatccaggcatctatttaccaggcatgagatgtgggggatttggatgcttggcagtttctggtaattatttctccagctgaggagcccagacaacatgctgaagcatgctgggagccatttccttttaaaatattaaaagacttaaagcaagcaattggacaatatgggccaaattctccttaggttcattccttgttacaatctgtggcttataacaggcatttaatacctatggattgggaggcattagcccactctaccctgtcccccactgagtttctccaatttaaaacctggcggacagatcaagcaacaacaaatcaggcatgcagaaatgctcaagcccaacctcctgttaatatcacatctgatcacttgcttggaatcagacaggcatggggtactctaaattgacagatggtaatgggtgatgagactgttgatcagctcagaactatatgcctcagagcctgggaaaaaattcacgaccctggtactacttatacttcttttaactcagttcaacagggtccaaaggagccttatccagattttatcacccatttgcaagacacggctcaaaaggctattttggattctcatgtcaggaaagtgatagttcagctgcttgcttatgaaaatgctgatacagaatgtcaggcagaaattagacctattaagggaaaggcagatctaaatgaggaaaaaactttaagtgaatacattaaagcctgtgatggcattggaggcacttgaataaggccagccttcttgctccggcaatggctagactaagggtaacaaaaaacatatgagtgttccccagatcttgctataattgtggacagataggacatacaaaaagagagtgtacaaaaaaggcaaaacttaggaggaaaaagcagggaaccaggtacctgtcccagatgtaaaaaaggaaaacactgggctaatcactgtcattcaaagtttgataacagcggacagcccttgccaggaaatggacagaggggccagccacaggccctaattcaaaatggggcattcccaattcaggacaggacgtccctgactacaaatggggtgttcccagcccagtctttccctgtacaaatgtgcagcaattgttcccctccacagctaaaagtggggcagtagatttatgctgtactgaagctgtatccctccttcctggggagcctcctaggaaggtcccaatgggagcttatgacccattgccagatggcaaggtgggaaggtccaacttaaatttaaaggcaattcaagtacacactggagtagtggactctgattgccagggagaaattcaaattgttatctcctccactgttccctggagtgctaatccaggtgacagaatagctcaactgtggcttttactgtatattaatttagaagaaagctcagaaaaaagaacagaataatttggaagcacaaattcagcaggcaagcctccctattggtaaatcaagtctctgacaatagatctatttgtatggtcactattcaaggaaaacaatttgagggtgtggtcgacacaggagcagatgtgtccatcatagctctttatcaatgaccaaaaaagtggcccaaacaaaaggccccagtgggtcttgttggggttgagggtttgcttgtatctcaccaggagagaatcagcttcctgtctgggtacccacaagacatcttaagttgtgccatgagccagaacccaaggaagaggaaaagacctcggaatgtctctgcacccccagttcatcagatggctcagatgaacatctctgttgagcagatggaaaccagtaaaactcaccaagcaactccactgacctgggggcagatgaagagactagctcacgttgcagaagagaacctgaggtctcagaacaagccgctgaccaccagtaatctaatggtagctatgatggtggtaatctccttggtgtgtcaccttgtagctgaggcagatcaaaattacacttattggacctaaattccattcccaccactgattaggcctattacattgttagaccccccagtagaggtttatattaatgatagtgtctggatgcctggaccaacagacaaccaaggtcctactcatccagaggaggaaggaatgttgtagccatgacctttaatcagatggtcccattgcagagttgtgttaaacctccttttatgttggcagtgggaaaaattaatatcctagctgattctcaaaccatatcatgcctcaactgtcatctttttacctgcattaattctacctttaataaagataatagcatgttactgtttagggcccgagaaggagtttggatacctgttcccctcaatagaccttgggaggcctctccctctatacatattatcactgaagtactaaaaggaatacttaatagatcaaaatgattcatatttactttaatagctgtgatcatgggccttatagctgtcacagctactgctgctgctgctggtgttgctttgcactcttctattcaaactgtgggctttgtggatagttggcagaaaaattcttctaagctttggaattcccaaagccaaatagatcaaaaattggcaaatcaaattagtgatctccgtcaaacagtaatttggatgggagattggattatgagcttggagcaatgtgattggaatacttctgatttttatattacttctagcttttataatgccactgtacaccattgggagatgattagatgtaacccacaaggaaaagaagataatttaaccctagatattgctaaactgaaaaaacaactttttgaggtatctcaggctcgtctcaacctgttgctcggagctgatattcttgctggagccactgatggcctttctaataccaatcctttaaagtggattaaaaccatagctggatcaacaattgcaaattttattttggtttacgtatgtttatgctgtttgtttttagtctacagatgcagacgacgccttcggagagaagccagacactgtgaacgagacatgatagtaatagcggttattaataaaaaaaattaatagagacaaaaaaagggagacctgcgggaaaaagagtttctggagtgccagatgagttggtctcccccgtgtgagacacccatggggagccatgggcagcctctaaggagaaaagtctccttattgccttcatgtccttatgccctgagagcataaccgctcagtggcatttcacaggttgatcagggagatagcactccctagaagcagtggagtataatcaaacatcttggtttctcctgaaacccactcccacccatttcagttctgataagttaaagatcttaagtagtttagacacgcctttgctcaaggaaatacacagaaatcgccactgctgttcatcttattgaatgactcacgagttctccttcattgattaatccttttcctcatcccttcctcaccctcccatctgccctaagaacaaagagcttgtaaaccaataaattaggcagagccaaagagctctgggcctctgacgctctgtacttctctgactctctcctctgagtctctttttttcacttgtctaagtctatccagggctctgggtctgtctgtatctgcatttacacctttcggagtgagcatctctctagctgtccacctcttcctttctctgtgtgtgcctctttccatctctctctgcttctccctctagcagtgtcctgtgtctttctcagattccttctccctgtttcactgggtcccagttattccctccatcccttcccaccttcttccctccctccctctccttcccctccttccctcccttcctctcccccttctctctctctggcactttgtctttctttctctctctgtctctccctggttctttctgtctctccctttctttccatctctccctggtgctctctctctctctccatctctctttcctctccccatctctccctgtctccatctcttctttgtgtcctctgtctttctgtctctctctcttctctctctctcttaatctgtctcaacaccccatgtctccctggtgctctcggtctctctctttctcagtctctctgtctctctccattcccctccctctctccttggtgctctttgtccttctttctctgtctctctttctctcccatctccccctggtgctatctgtctctctttctctccatctctctctctacatctctttctctgtctctctctcttgccatctctccctggtgctctctgtctgtctctctctctctcttcatctctctcacccccccatctctcactggtgctcttaatctctctttctctctctccatctctctgtctccctcctcccctctccatctctccttggggttccttgtctctctttctctctctgtccatctctgtctgtcttctctctctctccctctctgtctctgtctttctctctctctctctctcccatctctccctggtgatatctgtctctttttctatctgtctctctctttcctctctctctctctccatctctctctgtctctttctctcctgcatctctccttggtgctctcaatctctctttctctctctccatctctctgtctctctcctcccctgtctatctctccttggtgtttttgtctccctttctctctcttctctctctctctccatctctctctgtctcccccatctctccctggtgctctctctctctcttgctttctgtccccctggaacctttgtctctttctctcttcttacccatgctctttgcccacatacctctccttctggctctctgcctgtgggaaggagtaaggcggaggtgattatgtaattgtcattattccagagggtggggtgagggatgaggaggagatcaggaaggaatactttctttcttctcacctatccatcaacctggcctcatagacacctcccccagctccatggctactgaattgggtgggtaggtcagatcactgcctcccttccccagggaaggtcagagaatgaatcgtacagaaccagagggattgaggggctcaggctgggagacaggctgcagtcaggtggagcttcccaaaggagacaggcaggcctcagggctctccctcagctgccagaaaaggtgaaaagcagtggaatcaagatgccagtggaggctttggggagctcccaactcagctgggctgaggactgaggaatccagtttctaaaacaccaaaacagagacctttgagagcagaaggagggatgcctggcttccttcccagccctctggctctggaattcaacaagagagaaagggctttgctgcttgtccccttttgggtgtgtgtgtgtgggcacttcttggtcactatagtgaacctgaaaattccataagtcattaccccacctactagagaaaaatgcaaaagatttacactcccagcacctacacttcagcactagggatctcctcaccctagccacaggtctcagtatctcttacccacttcctgatatatttgagcctgtcccgggctgtcgaggcaggctcaccacactctttccatccttcaatctatctatctatctatctatctatctatctatctatctatccttttaattttcatccttctgtccatatgtccacaaattcatcaaaaaatccactaattatttcttctatataaatatcttttgctctattatctatacatgtaccaattaactttccatttatccatctatccaatattccatccatccattcattaacccttccatcattcaacaacttattaatatttacatccacctttccaattattattcatctatttcaatccatccatcaattaacccttcacccatctattaaatctttcatccatccacccgttagtcattctagtcataaatgcttccttacatccatccatcaatcgagataatttcattaaatttccattaaatttctagtgcattggaataagactcaatccacacttctggtaatctctaaatgtttcttactacacagtaaccccttttgtgtaggcatatcaatgtacaggtgtgagcttctgtgtacacatatgtgcatgtatccagagaatccaagtggtgtctagaaaatagaattaacatccccattccagggcagtctatatggcattctcgcaatacctcctcccactttcctatgcattcatccacttatttatatatgtaagaaggttcaggtctccttcctgtaagaaacactctttactctgcccctatcattcctagactgattcccctttcctccaactcagtctggacttttgttttttttggggggggatcctgcagggagagaaccttactctcttgatttcttgattgaaccttgaaggttgggagtggcttccttgacagcacagtctagagctttcataatccctccctatcactgtctagcacagacttgaacacaggaggggaggcaggcagaagcatgagactgagatgtagctctggccaaaggagaacgacagaggtgtagctctggccaatggagaatgatggaagattctttgatgcttctccaggaagccagctacctactggaggagttccagaagaccaagggcttgggggccacagggggagggctactaggtgactatgtggttatggagaactcagtcatgagaagatgggccttactgggagaaagctttggaatgggagaaaagggaaaatattaagaattcactgagctttctggccaggtttcatattaaacttaacgtaagctgggtgcagtggcacacacttgtagtcccagctactcaggaagatgaggcaagatgatcacttgagcctgggaggtcaaggctgcagtgagctatgaatgtgctattgtacttcagcctgggagatagagtgagacccagtctcaaaaacaaacaaacaaaaacaaacaaaaaacataccagttaatgtggaagagacttagagtccacttgtctagaaaccctaatccttgtcatcactctaaaatgtgaaacaaacatttcacactctgaccacaaccactaggtccccaactccttcactgcatcactgccaatagcctgaggcatacactggccaactaggtctttgggtaaggttccaaagaatgcaaaaactgtaaaaggtcaaggctccctcctggtaaaagactgtttaaaataacatttcaaaatcttgcgttacatacagggaagtttttcaagagccataagaaattacgggcagcttttctaatgtctcataaagaaaagaggtggggcatgacagtccaaagaagtgattaaaagcataaaatttacagtcacaagatcatacccaggctctgccctcattagctgtggaagccagaagcaagtcatttacaacttttggggctttacctaactcatttgcaaaatgaagatgacaaaatcaacctcacagacttacaatcatgctcttaaaaacttcacacagttctttttttatatataagagaaatagaggtgggctagggctatgtttgaattcaaacacagacaggtacaggcaaatatctgatgttaatatgtacacagcatggcccatgtgtctgcatacagacaccagaatgcatgcacaaaaacatccatacgcttgtatgtagtcaacctgttgtgcacacgtacacacaaatgtgaatatgcacatttgttgaatatccacatctagctggacccagaaaagcacgtcatagacctcccccaagtggcatatcccaaagcacatgtgcactcaggcgacatgcacagacagacccagagactggcaagcattcaggaacagtggcatgaacacacatgcacctcatcaggtactcacacaaatgtgcttgggcagacataagttggaaaggatgcccacttatcaagcacaaacacacaccccacaaagcctggcgcatgcataaattcatctatcaacagggacatgctgaaacatacatgcacacagaaacctcaagcatgcacccagagtgacacacacacacacacacacagatgtataaataagggtaaaaatggcagaggcatctaggataaaccattggacaaaatgacacaaacatgcaaaaatgcacttgcacaaagggcagttgaggggaaggttgtcttgcagggaagaagaaagagaaagacagaaagacaagatcatagacaaggggagagagacaggtgggcaaagtcctatgcaggtctccaggccatctagaatagtatgagagtctaatgcttgcctgtcctcttgcagaaacttaaattggtgaatatggtaaattttatactatgtgggtttttttaaccaccatagaaatatataaatataatgaaatctgagctaatctccaaaaaaaaaaaggcacaatgtcacatatgaccaaaatctgcatatgctatcaggagctcacagactccctgagatccactgattaaagtttttttttgtttttatttttgttttatttattatttttattatactttaagtgttagagtatatgtgcacaacgtgcagggttgatagatacatctacatgcattgtgttggtttgctccacccattaacacatcatttacattaggtatttctcctaatactatccctctctcattcccccaccccacgacaggccccagtgtgtgttgttccctgtcctgtgtccaaatgatctcattgttcaattcccacttatgagtgacaacatgtggtgtttggttttctgtccttgtgacagtttgctcagaacgatggtttccagcttcatccatgtcgctacaaaggacatgaactcatccttttttatggctgcatagtattccatggtgtatatgtgccacattttcttaacccagtctaccattggtgggcatttgggttggttccaagtctttgctattgtgaatagtgcttcagtaaacataagtttcagtaaacttcttcctggtttagtcttgggagggtgtatgtgtccaggaatttatccatttcttctagattttctagtttatttgcatagaggtgtttatagtattctccgatagtagtttgtgtttctgtgggattggtggtgatatcccctttataattttttttttttttttttccaaggcagaagaatttttcttagtacagaacaaaatgaaaagtctcccatgtctacttctatccacacagacccggcaaccatccgatttctcaattttttccccacccttcccgcctttctattccacaaaaccgccattgtcatcatggcccatccccaatgagccgctgggcacacctcccagacggggtcgtggccgggcagaggggctcctcacttcccagtaggggcggccgggcagaagcgcccctcacctcccggatggggcggctggccgggcggggggctgacccccccaccaccctcccggacggggcggctggccaggcagaggggctcctcacttcccagtaggggcggccgggcagaggcgcccctcacctcctggatagggcggctggccgggcggggggctgaccccccccacctccctcccggacggggcggctggccgggcagaggagtcctcacttcccagtaggggcggccgggcagaggcgcccctcacctcccggacggggcggccggccgggcggggggctgacccccccacctccctcccggacagggcggctggccgaccccccccccccgcctccctcccggacggggcggctggccgggcagaggggctcctcacttcccagtaggggcggccgggaagaggcgcccctcacctccaggacagagcggctggccaggctgggggctgatccccccacctccctcccggacggggcggctggccgggcggggggctgaccccccacctccctcccggactgggcggcttgccgggcagaggggtcctcacttcccagtaggggcggccgggcagaggcgcccctcacctcccggacggggcggccggccgggtggggggctgaccctcccacctccctcccggacggggcggctggccgggcagaggggctcctcacttcccagtaggggcggccgggcagaggcacccctcacctcccggacggggcggctggccaggcggggggctgatccccccacctccctcccggacggggcggctggccgggcggggggctgaccccccacctccctcccggactgggcggctggccgggtggggggctgaccccccccacctccctcccagacggggcggctggccgggcagaggggtcctcacttcccagtaggggcggccgggcagaggcgcccctcacctcctggacggggcggccggccgggcggggggctgaccctcccacctccctcccggacggggcggctggcggggcagaggggctcctcacttcccagtaggggcggccgggcagaggcacccctcacctcccggacggggcggctggccaggcggggggctgatccccccacctccctcccggactgggcggctggccgggcggggggccgacccccccacctccctcccagacggggcggctggccgggaagaggggtcctcacttcccagtaggggcggccgggcagaggcacccctcacctcctggacggggcggccggccgggcggggggctgacccccccacctccctcctggacggggcgactggccgggcagaggggctcctcacttcccagtaggggcggccgggcagaggagcccctcacctcccggacggggcggctggccgggcagggggctgaccccccccccacctccctcccggacggggtggctgccgggcggagacgctcctcacttcccagacggggtggctgccggtcggagacgctcctcacttcccagacggggtggctgccggacggaggggctcctcacttctcagacggggcggttgccaggcagagggtttcctcacttctcagacggggcggccgggcagagacgctcctcacctcccagacagggttgcagcccagcagaggcgctcctcacatcccagacacggcggcagggcagaggtgctccccacatctcagacgatgggcggccgggcagagacgctcctcacttcctagatgggatggtggccgggaagaggcactcctcgcttcctagatgggatggcggccgggcagagacgctcctcactttccagactgggcagccaggcagagaggctcctcatatcccagacgatggggggccaggcagagacgctcctcacttcccagacagggtggcggccgggcagaggctgcaatctcggcactttgcggggccaaggcaggcggctgggaggtggaggttgtagtgagccgagatcacgccactgcactccagcctgggcaccattgagcactgagtgaacgagactccgtctgcaatcccggcacctcgggaggccgaggctggcggatcactcgcggttaggagctggagaccagcccagccaacacagcaaaaccccgtctccaccaaaaaaaaaaaaacaaaaaaaaaaaacgaaaaccagtcaggcgtggcgacgcgcgcctgcaatcgcaggcactcggcaggctgaggcaggagaatcaggcagggaggttgcagtgagccgagatggcagcagtaccgtccagctttggctcggcatcagagggagaccgtggagggagagggagagggagagggggagggggagggggagggggagggggagggggagggggagggggagggggagggggagggggagggggagggaatgggagagggagaggccctttataattttttattgcatctgtttgattcttctctctattctttagtcttcctagtggtctatgaattctgtgatcttttcaaaaaaaccaactcctttattcactgatttttctgaagggtttttgtgtctctatctccttcagttctgctctgatcttagttatttcttgccttctgctagcttttgaatgtgtttgctcttgcttctctagttcttttaattatgatgttagggtatcgattttagatttttcatgctttctcttgtgggcatttagtgctataaatttccctctacatgaaaaaatgctcatcatcactggccatcagagacatgcaaatcaaaaccacaatgagataccatctcacaccagttagaatggcgatcattaaaaagtcaggaaacaacaggtgctggagaggatgtggagaaataggaacaattttacactgttggtgggactgtaaactagttcaaccattgtggaagtcggtttgatggttcctcagggatctagaactagaaatgccatttgacccagccatcccattactgggtatatacccaaaggattataaatcatgctgctataaagacacatgcacacgtatgtttatagcggcactattcacaatagcaaagacttggaaccaacctcaatgtccaacaatgatagactggattaagaaaatgtggcacatatacaccatggaatactatgcagccataaaaaaggatgagtttgtgtcctttgtagggacatggatgaaactggaaaccatcattctcagcaaactatcgcaaggacaaaaaaccaaacactgcatgttctcacttataggtgggaattgaacaatgagaacccatgtatacaggaaggggaacatcacacaccagggactgttgtggggtggggggcggggggagggatagcattaggagatatacctaatgctaaatgacaagttaatgggtgcagcacaccaacatggcacatgtatacatatgtaacaaacctgcatgttgtgcacatgtaccctaaaacttaaagtataataataataaaataaaaaaaaaatttccctctacacactgctttaaatgtgtcccagagattctggtgctttgtgtccttgttctcattggtttcaaagaacatctttatttctgtcttcatttcgttatttacccaattgtcattcaggagcaagttgtttagtttccctgtagttgtatggttttgagagagtttcttaatactgtgttctaatttgattgcaatgtgatctgagagacagtttgttgtgatttctgttctttcacatttgctgaggagttcttcacttccaactatgtagtcaattgtggaataagttggatgtggtgctaagaagaatgcatattctgttgatttgaggtggagagttctgtagatgtctattaggtccatttggagcagagctgagttcaagtcctggatatcctttttaaccttctgtcttgatgatctgtctaatattggcagtggggtgttaaagtctcccattattattacgtgggagtctaagtctccttttaggtctctcaggacttgcttaatgaatctgggtgatcctgtattgggtgcatatttagaatagttagatctccttgttgaattgatcactttaccattttgtaatggccttgtctcttttgatctgtgttggtttaaattctgttttcttcgagactaggattgcaacccccattttttttttccttccatttgcttggtaaatcttcctccatccctttattttgagcctatgtgtgtctctgcacatgagatgggtctcctgaatacagcacattgatgggacttgattctttatccaatttgccagtctgtgtcttttaattggggcatttagcccatttacatttcaggttaatattgttatgtgtgaatttgatccggtcattatgatgttagctggttattttgcccattagttgatgcagtttcttcctagcatcaatggtctttacaatttggcatgtttctgcagtggctgctaccagttgttcctttccatgtttagttcttccttcaggagctcttataaggcaggcctggtggtgacaaaatctcttagcatttgcttgtctgtaaaggattttatttctccttcacttatgaagcttagtttggctgaatatgaagttctgggttgaaaattctttgctttcagaatgttgaatattggcccccactctcttctggcttgtagagtttctgccgagagatccactgctagtctgttgagcttccctttgtgagtaatccaaactttctctctggctgcgcttagcatttctttcttcatttcaaacttgatgaatctgacaattacgtgtcttggggttgctcttctcaaggagtatctttgtggtgttctctgtatttccggattttgaatgttggactgccttgctaggttggggaagttctcctgggtaatatgctgaagagtgttttccagcttgtttccattctccccatcactttcaggtacaccagtcaaatgtagatttggtcttttcatatagtcccatatttcttggaggctttcttcgtttctttttacttttttttctctaaacttcccttctcgcttgatttcattcatttgatcttcaatcactgatactcttccttccacttgaccgaattggctactgaaacttgtgcatgtgtcatgtagttctcatgccaacgttttcagctccatcaggtcatttaaggtcttctctatgctgtttattctagttaccattcatctaatcttttttcaatgtttttagcttccttgtgatgggttcaaacatcctcctttagctcagagaagtttgttattaccgactttctgaagtttacttctgtcaactcatcaaagtcattctctgtgcttttttgttccgttgctggctagcagctgtgatcctttggaggagaagtggtgctgtggtttctagaattttcagcttttctgctctggtttctccccatctttgtggttttatctacctttggtctttgatgatggtgacctacagatgtggttttggtggggatgtgttttttgttgatgttgatgctatccctttctgtttgttagttttccttctaacagtcaggtccctcactgcaggtctgttggagtttgctggaggtccactccagaccctctttgcctggggatcaccagcagaggctgcaatacagcaaatactacagaatagcaaaaattgctgcctgatccttcctctggaagcttcgtctcagaggggcaaccagctgtatgaggtgtcaatcggccattatttggaggtgtctccaagttaggctacatgggggtcagggacccacttgaggaggcagtctgtctgtctcagagctcaaacaccatgctgggagaaccactgctctctttagagctgtcagacagggacatttaagtctgcagaagtttctgctgccttttgttcagctatgccctgcccccagaggtggattctacagaggcaggcagccttgttgagctgtggtgggctccacccagttagagattcctggccactttgtttacctactcaagcctcagcaaaggtggtcgcccctccctcagccaggcttgccacctggcagtttgatcttggactagcagtgagcaagactctatgggtgtgggacccactgagccaggtgcggtatataatctcctggcatgccatttgctaagaccattggaaaagggcattgtttaggtggcagtgtcccaattttcccattacagtctgtcacaaaaatccccaactgcttgcactttgtgggtgaggcaatgccccaccctgcttcagctcaccctccatggtctgcacccactttctgaccagtcccagtgagatgaaccaggtacctcagttggaaatgcagaaatcacccatcttatgcatcattcacgctgggacctgcagaccagagctgttcctatttggccatcttggaacagctcctgattaaagttttcttgatcattggatatcatctgagtgggtggatggcttctctgccttgctcatatttatacatttcttccttcaggggcctcaaatccgtactgtcagggttatcacccatgttaatgattgatttatagggcttaagttagatttgaattaattccttcactgagcaacacgggtcctgtggatgattttcctataatcctgaggatcaggatctttgttgcaaaagaggcatgggcagcagtggcagaggtcctggtgagccatctgctcttaggagcatggatttcagtatgccaccaaatggctgcttttttccctcttctctctctttgtctcactttttgttttttgacggagacttactctgttttttaagatggagtcttgttcttgtcacccaggctggagtgcgatggcttgatttcagcttactgcaaactctgcctcctgggtttaagagattctcctgccttagcctcctaaataggtgggattacaggtgcccacgaccacactcatgtaatttttaaattttttgtagagacggggtttcaccatgttggccaggcttatctcgaactcctgacctcagttgatcaacccgtctcggcctcccaaattgctgggattacaggtgtgagcccttgcacccagctgtctctttctcactctccaaagattgctgtttcttgaatgactatccagtgggcccgtatattacaccaaatagagtcgttcacctgagtgctctatagattggggcccaatgcctggttgagacacataccagttggtggaaaggaagagtctttttcctgagcctagcatcattcacaggtgcattctaagatacacagataagtccaggctgagacacatgatccatggctatattaaagagggtcttaatcccatcatcctgtcttttaatgccaattaattaacaaaacttctgaccaaggtttactaagtctttaatggaggctcagtaggactcaacaatgaaatacaaggcagcacaggtcaaggcacaggctggctagaaggcagcagctgaaaatgcatgctaggtatcaggtagtggagtgggttagcaggttagcaagccaaagcaaaagaagaaagacccctggtgattgtagtcagaatctagcagctctgttcacagtgtcaattgttatggtcactcacagaagcagatggacacccacccaaaatttggaccaggtgtcaaaaccgatgatgccacacacacgatgagagggcatggaaagttttattgctcccataattgaggcctctagggagagtgggacaggcccttgatttctatggtggctaggggctgagggtggtgtgaaagtcctactgtactcctgcatgttcaggagcttgtgtggtttgaatcttccataggcaccaaaggagagagaacctgggctttctttattattattattgtcattactattattattattttaattgacacattataattgtacatatttatggagtaccgtgtgatgcttcaatacatgtgtacaaagtgtaaggatcacagatcccggtaattagaatatctatcaacataaaataatatgagagtgatatatcatcatattcataggtttttaagattattgcaccaaatatgaaatttcttgaaatatttcagtgaaatatcttgtgaaaccatttttagaaattttgcctaccttggtccaccctcccaccctcaaagattcatgtccctttcacatgcaaaatatattattcctcccctgaggttcctaagagttttgttccattacatcaattcaaagattaaaatcttatctgcatataatcagctcacaagtaccaaatctcgttatataaatccggtgtggatgaaacttctaggtataatttctcgacatctgtggaccctcagcagtgaagaaacaagttatctgttctcaatatacaatgatgagacaggcaataggataagagttatagacattcaagttcaagagagggaaaatggaagataaaaaggagtgcccagctcaaagcacttttgaaatccagatggaaaaactccagctgaagccccttggttaggtttcagggcccaggaaaacttctccatagtttttgatcctgtcctctgggcttttggctatgccctgtgtgtgctgttagtgctgctaaaacaaaatacctgaggatgggcaagttataaagattagaaatttatttctcatggttctggaggttgggaagtccaagatcaaggaaccagatggattggtgtctggtaagttctgctctctgcttccaaggtggcaccttgttgctgcctaccctggaggaaaggaatactttcctttcccatattattttacgtttattattattatactttaagttttagggtacatggatcttcaaggatccagaactagaaataccatttgacccagccatcccattactgggtatatacccaaggattataaatcatgctactataaagacacattcacatgtatgtttattgcggcactattcaccatagcaaatacttcgaaccaactcaaatgtccatcaatgatagactggattaagaaaatgtggcacatatacaccatggaatactatgcagccataaaaaatgatgagttcaagtcctttgcagggacatggatgaagatggaaaccctcattctcagcaaactatcacaaggacagaaaacgaaacaccacaagttctcactcataggtgggaattgaacaatgagaacatttggacacagggagcggaatatcacacagcggggcctgtcgtggggtgggagaatggggagggatagcatcaggagatatacctaacataaatgacgagttaatgggtgcaacacatcaacatggcacatgtatacatatgtaacaaacctgcacgttgtgcatgtaccctagaacttaaagcataataaaaaaataaataaaataaaataagaagaagaaaaaattaaatctaagtaaagcacttagaacaatggctggcacatagcaaatgctgtgttagttgctgttcttccaggccagaagcgacacagacaagttaccaccaggtggcgctgtattcctccagctccacaggttactcaggctcagagtctgggggtgcatctcaacagccctgaatttgaatcctgctctgccactgcctagtcgagacatttcactacatgcctagctgagacatttattagctctaggcctcattgtattcatttcatttcattacttttttttctttttttttgagacagagtctcactctgttgcccaggctggagtgcagtgtcacagtctcagctcactgcaaacttcgtctccagggttcaaaggattctcctgcctcagcctcccaggtagctggggttacaggcgcccgccaccacgtctggctaatttttgtatttttagtagagatggggtttcaccatgtcagccagcctggtctggaactcctgacctcctgtgatccacccacctcagcctctcaaagtgctgggattacaagcacgagccaccatgccaggcagaaagctggttttcttgagaggtgatgaagacttgaggctacgtcaatcatacctgagttagaattccagttccagcacctacaatctctatttcctttgataaatgacatcaccagtctgcccttcagttccctcctttagaaaatgagtattttaacaaaacctatctctgtataacatacagcaatcatgatgcctacaccatgaggattcagtgtgatactgtaggaaatcctttaacgcaaggcttggcacaaaaagacactcctatcaaccttaaaatattaagactaatattaaactaagacttgagggcttgttatatatcaggaacataacaccatgaattctcatagcaacatcatgagacagataatactgtcatgatttccatattatggaagagggaactgaggctcaaggagatgttacttgtggaaagtcacacatttgggatttaaaataaggcagcctgtctccagaacccatattactcaccattatgctagactggactccctcaccctcgtaacccatgttgtgtgcccaaaattcaagtttcttctgggcttgaggtctttgaacagctagaggtcttccatcccttccatcttctgtactggagtggatgattcaagaagtagaaaactggccaggtgtggtggctcacacctgtaatcccagaactttgggaggctgcggtgggtggatcacctgagttcaggagtttaagaccagcctggccaacatggtgaaaccccatttctactaaaaatacaaaaattagccaggtgtggtggtgcgcacctggaatcccagctgctcgggaggctgacacatgagaattacttgaagtggggaggttgcagtgagccaagatcacaccactgcactccaacctgggtgacagaatgaggttccatctcaaaaaaaaaaaaagaaaagaaaagaaaagaaatgaaaaaagggggaaaaatacaaaaccttctgctctttgaccatgcagattatgataatactgtagggtagtgatgctctgctgagaacatgcctcagaattgcctgcaggccttgttgaaacacaggttttcggtttctgatttagtaggtctggggtgtggtctaagaattcgtgtttttaacaagtttcagatagctgagtgtgtggtgtatgcctatagtcctggctacttgggaggctaaggcagtaggattgcttgggtgcaggaggtcgaggctggagtgagctgatattgcacgactgcattgcagcatgggtgacagagcaagaccctgtctgtctgtctaaaaaaaaaaagttccaaggtgatgctgatgctgcaggtctggaggctgcactttgagaaccactgaactatagcagagcaacgagtttgaaggaatctgggtccatgattgaccacaaggaggggagccaccttgccatgctggactaactgtctacttcaagagggacacaaaatagagaaagaaacttgtattttatttcagtgactgcattatgggatctgttggttacaacaacctggcctttaccttaattaatatagacatttttcaggctgttttcctgcagatgccctgatagatatctttgttcccaccagccttcagtgacttagccaacatctgtcagcaggtccagttctgtggattcccctcaaggtccagagcttgcttcctactttccttccttccttccttccttccttccttccttccttccttccttccttccttccttccctccttccttttcctttctctcttttcttttctttggcagggtctcactctgttgctcaggctggagtgcagtggtgcaatcacagctcactacagcttcgaactcctcggctcaagcgatcctccccgcttagtctcctgagtaggtggggctacaggcacatgctaccacccccagctaatttttttattttttgtagagacatggtcttgctatgtcacccaggctgggattacaggcattagccaccgtgtctggcttcagagtgatttttctacagcacaaatttgactgtgacttaccctactttaaatctcccatggctccaaaggctctaggaaaaagtcaaaactcctcagtgggacattcagagatttttctaagaatccaaaggacctctcatggtccatgtcccaaaatttcccccgatggaccctctgggctaaactttttctcttgttacctctagccaaacacaacacagttccaagcctcctgccctttcctcttgctgttcctcctccctgaggtgcctttcatggctcaggctgtggccaggatcagcgtggagtcagtagcttggatgggtggtccaggtccagtgctcactgagtgaccaggatctggtctcagaatgtgaccgaggtctgggtcagcgttcaggcggaagcaaggcttggggttcaggttgtccatttttcattttctcagaatatttactgacctgttgtcagctgatattttgagatatccaagccctgggccattctggcaccagatggagtccaagggctaggctaggatggctcctgggtgtcatagtcattgaaaggttcactgttgtattaaagaacccaaaacctcagtggggttcagtcacggggctccatatcagatctgagcatctgagtcctctgcccatccctggagccccaggatcccctccctgcttagttatcccagtgctccccctaccatcccacagctgcatttggtttattagaagggtggggagcagtaaatgtatttgaccaactcttgtgtaccaggtctagtacacacatgtcctcactgagtcttcaaaacaacactgtgggccatggacggttcctcacacctgtaatcccagcattttgggaggccgaggcgggaaaatcacatgagggcaggagttcaggaccagcctggccgacatggtgaaaccccatctctattaaaaatataaaaattagctgggtgtggtggcgtgcgcctgtaatcccagctactcaggaggctgaggcaggagaatcgcatgaacccaggaggcagaggttgcaatgagccaaaatcacaccactgaactccagcctgggcaacacagtgagactctgtcacaaaacctgcccccatcaaagcccccaaaaaaccctgtggaggagtgctattctcagccccattttatttttttaatttatttttgagacagtgtctcactctatcacccaggctggagtgcagtggcatgatcacagctcaccacagccttgacttcctgggctcaagtgatcctcccacctcagcctcctgactaggactacaggtgtgtgccactaagcctggataatttttaaatttttttgtagagaaggggtctcactgtgttgcccaggcttgtctcaaactcttgggttcaatcgatcctcctgcctcagcctcccaaagtgctgggattacaggcatgagccactgtgcctggctgcatcaccattttatagataaggaaacagaggcacagaggagtgaagacatttgctgaacttcacatcactagcggctgttccagaattcaggtagaacagttacttcagatctattctcctttgcatggccactccattctcattttacagatgagaaacggaggctcagtgaggggaaataggggaaatgtcttcattaggactgtacaggcaagggtaggatttgaacactgcattcctctttacagggcacagataagtacctgaggtattccagggctgtccaggtggaggcccttgccttggccacaggagtgcatggagtgggggtgatattagaacacaggtcaccgaagtgggtggatcatctgaggtcaggagttcgagagcagcctggccaacgtggtgaaaccctgtctttactgaaaatacaaaaattagctgggtgtgctggtgcttgcctgtaatcccagctactcaggaggctgaggcaggagaatcactggaacccgggaggtggaggttgcagtgagccaagatgcctccattgcactccagcctgggtgacagagcgagactccatctcaaaaaaaaaaaaaaaaaaagaacgcagttcagaagaattcctcaggagattaagggtccccacctgctttgtccacagagtttatgtccttctcaagaagggtgtgagagagatacacagagaaatgtctagggatacagggctcttttattgctagttttttttttttttttttttttttaagatggagtctcactctgttgcccaggctggggtgttgtccaggctggagtggagtactttagctgtggcagcccatcagtagctcccccagcccatgtttagctccctggacctgtctctagctccctccacctctctatgaatgtctatatctctccctgtgccaattacacattcctcaaacacttacagtgtgtcctccccatggcatattgagtctcatttccatcctcacaatgactctatagggtaggtgtattagttcattctcatgctgccaatgaacacatacttgacactgggtaatttataaagaaaaagaggtttaatggactcacagttccacatggctggggaagcctaacaatcatgacagaaggcaaaggaggagcaaagacacatcttacatggaggcaggcaagagacagagtgtgtgcagggaaaactgccctttgtaaaaccatcagatctcgtgagacttattcactatcacgaaacagcatgggaaaattcactcccatgattcaattacttcccactgggtccctcccatgacatgtggggattacgggaattacatttcaaaatgagatttgggtggggacacagccaaaccatatcattccaccccgacccctcctaaatctcatgtcctcacatttcaaaataaatcatgccttcccaacactccctcaaggccttaactcatttcagcattaactcagaagtccacagttcaaagtctcatctggtacaaggcaagtcgcttatgcctataaacctgtaaaattaaaaacaagttaattatttcctagatacaatggaggtactgccactgggtaaatacacccattccaaaaagagaaattggccaaaatgaaggggctataggccccatgcaggtccaaagtccagcagggcagtcaaatcttaaagctccaaaatgatctcctttgacaccatgtcttacatgcgggtcacactgttgcaagaggtgtgttcccatgacgtcaggcagctctgcccctgtggcttgcagagtacagccccgctcctggctgccctcacgggctggcattttgtgtctgtggcttttccaggtgcacagtgcaagttgttggatctactattctggggtctggacgacggtggccctcttcccacagctccactaagcagtgccccagcagaggctctgtgtgggggctccaaccccacatttcctttcttcacttctctagcaaagttctccatgaggactctgctcccttagcagacctcttcctggacatcctggtgtttccatacatcctctgaaatctaggtggaggttcccaaacctcagttcttgtctcctgtgcaccacagtcccaacaccacgtggaagttttgaaggcttggggcttgcaccctctgaagcaaacacttggccagctttagtcaaggctggagtggctgggaggcagggtaccaagtcccaaggctgcacatagcaggggatccctggagacattttccccattgtcttggtgattaacattctgctcctggttacttatgcaaatttctgcagctggcttgaatttctccccaggaattggggttttctcttgcatcttcaggctgcaaattttccaaacttttatgctctgcttcctcttgaatgctttgctgcttagaaatttcttctgccaaataccctaaatcatttgtatcaagttcaaagttccactgatcttttgggcaggggcaatatgccaccagtctcttggcatagcaacagtggcctttagtgcagttcccaacaagtttcccttctccatctgaaaccacctcagcctggacgttattgttcatatcactatcaacattttggccaaagccattcaacaagtctctaggaagttccaaactttcccacattttcctgttttcttctgagtcttccaaactgttccaacctctgcctgttactcagttccaaagtagcttccacatttttgggtatctttagagcagtgtcccactcccagtaccaatttactgtgttaatccattctcatgctgctaatgaagacgtacttgagactgggtaatttatagacaaaaagaggtttaatggactcatatttccacatggctggagaggcctcacaatcatggtggatggcaaagaagtagcaaaggcacgtcttatatagcagcaggcaagagagagcagcaggcaagcaagggaaacttccttttataaaaccatcagacctcatgagacttattcactatcagaagaacatcacgggaaaacccgtccccatgagtcaatcatctcccacagtgtccttcccacaacgtgtggggattatgggaaatacagtttgaaatgagaattgggtggagacacagccaaacaatatcactaggtatccatattttccagataaggaaactttaggctccaagctgagcttgcacttgcctgagcatctttagcacaacaaatgaatgacaaagctgggatttgaactcaggtatgtctgactcaaattagtcctttattctgacttcccagagtgtgcccctcagagccttggacctgagaaatagtgacgagtgctgtgatggaaaagaaaaagctgagaagccaaatagtccgcacagctgctgtcagccccctcccctcttgatgttattttaaaggcacataaacattctaaagaccctgagaagtcctgcaggtgagaaattggcttcctgtcatttaacccagtttctcccttgctatttacctgcagaatcccttttctccagaacttattctcttcctctgcctctcacactctctctctttctctctgcctcctactctttactatctctctctgtctccacattctgctgagagaggcatcatggggtagtgattaaaacagtaggctgtagaaccaaactttctgggtttgacaactgattctacctttagcctgctgcgtgacattgggagaagtctcaacccctctgtgtttcactttctccatccacaaaatgggggtgaaaacaattactacatcaaagggtgacaactaagtgaattactctattgaaagcacttcatgcctccttatcagtgctccccaagggtggaatgaggacccagagtacccgtattaggccatacttgtgttgctataaagactgtgccagattgcacaacacagcaggagacaggtcctggggtcaggaaagtccatggtggcatctttcctaggtcaggaaagtgtgggttgtactttgttggtcctctcctcgtgggttggggaagtatggggtgcagctgctcctggcagctttgactttcagcctcagataatgcattgcctgtgtctaatccacatggatgtggggtgactcagccacctccattccctgaatcagcatcttcagtggcggcaagtggtttgtttagctatgcaagcaagatgcagatttcccattttaaatgagaaaaaaagcagcaggcagagacagcagatgtggacacattcattcacatgttgggtgattagggactgacccctgccaggggcagggaggggacaggctcacagcagtgatggagacagacccaagcctaggggacatcaatcaaactggacccagtatctgtgcttctggatctcagattctagagaaacagagacacagaaggggatagaagagggtggggaagaggtagggggcaatgggaagagaggggggttgcattgatttgagatctttcttcttcttaaagaacgtttagttactgtaaagttcctctgtgagctatctgcaccccatgtttattgtagcatactcacacagccaatatatacaatcaacctaagtgtctatcaacagatgaatgaatggataaagaaaatgtgctatgcatgcatgtacacacacacacacacacacacacacacacacacaaatattatttagccttaagaaagaagaaaatcctgtcctttgcaacaccaggggtgaacctggaccatgttacattaagtgaaataagtcaggctcagaaagatatatactgcatgatctcacttttaagtggagtataaaaaagtttaactcacaaaagcaaagagtagaatgggggttaccaggagttggtggagagggtgaggagatgttgatcaaaggatacaaaatgtcagttaggaggaataagttcaggagatctattacataaatgggtgactatagttaataacaatggattgtgttaactatacattaattgaaaagcaattacttgaaatttgctaaatttgaaaattgctaagtggtttatgactcccacctgggggtgaagcaatgctccacagccactgaaagcaaccctgctctcctcaagagaccccgctgagcatctgctgaagacccgggcattagcccctcctgcctacctcagtcagtgcccacacacaattgaggggtctgaggacaggcccacctgatccagctccacccctctagtgcccaaacatgtcatacgggggactaggtatcatcctgctccatccaacacctttggcagctgagtatcaaagtaccaaagtactcggcacctgagtactcctcccagggaggaggtgggcccacccaacctgccgctaccaccatggctggcacccacctgcatgtgccaccagcaggcctggtgactggcctatccagcccattataccaccaaccacaaaagcatggaccattttggagctagaggattatcctgccacagctactgttcatgccatgtccaccacgcaggggcctgaggtcccacctaccagcccagcccaccattccactgtcagaacctgagaaagtcacctggaggcccaagaattggcccacctagatccactaacaccattgccagtgtatgctaccctcagacccaaggacaggcatactcaccatgctgctgccaccccttggcgcacctaatgtccccatctcagaacaactttaccacggcttccactaacaaccacaccctaagccaatggggaaatcacagacactactgacactgtttacagaggaagaaatcgtatgggaaccacactaatgcgtgcactcagagtcaaagtcaaagtgcccaacccaaccaacaccataggtacaacttcagggaaaatgtcctcccctatgaaagcagattcaaaaaattaaaagaagcaaccatgatcccaaatgcacagatatcaatgtaaagacacaagaaacatgcaaaagcaagaaaacatgacacccccaaaggaacacaataattctccagcaagagattctaaaaaaaattaatctaggccaggtgcggtatctaatacttgtaataccagcactttgggaggccaaggcaggtggatcacttgaggtcaggagttcgagaccaacatgcccaacatggtgaaaccccacctctactaaaaatacaaaattcgccaggagtggtggcacacacctgtaatcccagttacttgggaggctgaagcataagaattgcttgaacctgggaggtggagtttgcagtgagctgagatcgcaccactgcactccagcctaggctacagagggagactccatctcaaaaaaaaaaaaaaaaaagaagaagaggaagaagaaatccataaaatgccttaaaattcaaaagagtgatatttaaaaagctcagtgaaacacaagagaagtaaaaaaaatacaaaaatgtcagaaaattcagaatatgaatgagaaatttaccaaacagatcactatcatagaaaaaaagatccaaacaaattctggaactgaagaattcattgaattaaatacaaaacaaattcaaaagcttcaatgatacactagataaaaaaaaattaacaactacataacctgaagacaggtcttttgaaataactcagtccagaaaaaaataaaaaaataagaaacaataagcaaagcatatctgatatataaaacataagaaagcaaccaactattcaaattttgactatcccagaaggcaaaaaggaaacaaaagggatagaaaacctgtttaatgaaataatagctaaattcttctaaaatctatcaagagatttagatatctagatatacgaagttcagagacccctaggtagttacaatgcaaaatgttcttctccatggcacattgtattcagattgcttaaagtcaaagattaagagcaaattctaaaaacagtgagaaaaaagcatttagccatctataaaggagcccatcaacagtggatttgcaagcagaaaccttacaagccaggagaaaatgggatcatatattcattgagctgagttttcgctcgctctccaccactgctgaatgccgcctgcagacgtgccactgacttccacccgtccggatccagcatggtgtccactgatagaaaaaaactatctgcaagatactgtacccagaaaagttatactttgtaaatgaaaaggaaataaagtctttcccaaacaaataaaagctgagtaaatttatcatcactaaaccatacctacaagaaatgcttaaagggatcttacacatagaagcaaaaggaggatatctaccataaggaagcacacaaaatataaaacccattggtagagaaaacacacaaatgaggaagagaatagactcaaatggaagcacaacaacaacaaaaaacccaccaaactgttacaggagggtctttctttttagagctcccaagatggtgatgggccgctcccagatggggcaggccacttccaagatggcagcaagccttttgttctctgagctggggttcttggcctcatggattccaaggaattgaaccctgggccatgcagtgagtgttatagctctattagaagccatgggtcatggaagagaaccgtggaacccagtgactagtgttcagctcgattagaacaaacccaggcacttagccatggaagaacagtggtgagcctttagcctgattgggagcagcaatgggtgccttgctgggtcaggagtgcagcggacaccatgctggatctggaggggtggaagtcagtggcacatcggcaggcggcattcagcagtggtggacagcgagcaaaagctcagctcaagctggaacaaacatggaccagaagagtgtgcattggcaagatttaatagagtgaaaacagagctccaatacaaagagaggggacccaaagggggttgcccacccctggctccaatgcctggggtttatatcccaatcattgtccctctccctgtgctctcagatgatagatgatttgactatttctttacctcctacttttagcctaattggtattttagtgagccctctttactacctgattggtcaggtgtgagctgagttacaagacctttgtttaaaggtgggtgcagtcaccttccccagctaggcttaggaactcttagtcggcctaggaaatccagctagtcctgtctctcagtaccccctctcaacaggaaaacccaagtgctgttggggaggttggccaacaactgtactaacttctttctgctgaatgggggcataataggggtcatgcagttgagatttcctcaggagggatgtctttgatgtcatcaacattggagcatgggctaggaggcagatccaggggtctgccgtagatcttagccatggactgcacctggggctccgtttgaagaactatttgtagttttacagcttcaattctggaagagacaaacttaacaaggaggttaaagacacagggattgaaatgtctggcctgaagtgcaggggattatttctttggcacacttcacaggccctgactacctgcttgatagttttgaaaaggcctggtccagcaaataatgatttggccattggatgggtgctatcaacgcctaaatgaaaggtttggtgaagggttttaagtaatttccattggttagctgcaggcaaaagtatttttccttctttggtggctagacatcctgaggggagggaactatgtccttgtgaggtaccccattctatttcttctgctgagcactggggcttggtttcctggaggggattaccccatactagggttccttctataagcatttctaatggagggtcccgccttgtggctctttggcttcaatatctgcttggtggttcccttctatttccctttcctttcctttctgatgaccccagcagtgtaagatggccacctctttaggtttccgtacagcccataataactcataatggcttcctgatgtttaataggtgttccctcagaagttaggaattccatttctcaccatatttttgtgtaggcatggaggagaaggtaagcataattagagtgtttatatatatttacccttttcccttctcctaattctagtgtatcatggcccctgcttttgctaggatgtctctccctaacaaaggagtggggctttcaggcataattagaaaggcatgtgaaaagagtaaagtcccccagttacaacttagtggctgggcgaagtaactagtgactgcttgtcctaggacccctcggatagtaacagatctggaaatccagctagtcctgtctctcaaaactacaatgataaacaataagagaaaaagaaaggaagaaaggatatacatacataaagaagccaactaataatatgacaggattaagctctcacatatcaataataaccttgaattaaatggattaaactttccacttaaaagaaagagactggctgaatggatttaaaaagcatgacccagctatatgctgcctacaagaaacacatctcaccaggaaagacatatatagtgaaagtaaagaaatgagaaaagatattccatgcaaataaaaaccaaaagtgagcagcaatacctatgtttataaaggaaacagactttaagtcaaaaactgtaaaaagagacaaagaaggtcaatacataatgataaaaggatcaatcgagcaaaggatccatgaggaaattcctgcctaataaattttggtcagaccggttgtctgctctcaaaccttgtctcctgataagatgttatcaatgacaatgcttgcccgaaacttcattgcaattttaatttcaccccggtcctgtggtcctgtgatctcgccctgcctccatttgccttgttatatcttattaccttgtgaagcatgtgatctctgtgacctacaccctattcgtacactccctccccttttgaaaatcactaataaaaactttctggttttacggctcagggggcatcatggaacctgccgacatgtgatgtctcccccggacccccagctttaaaatttctctcttttgtgctctgtccctttatttctcaggctggccgacacttagggagaacagaaaagaacctacgtggaatattgggggtgaattttgcccgatatctggctgaatttcccctgataatgccactctctatgtccatgtgtacacattgtttagcacccacttatgaatgagaacatgtgatattcactttctgtgcctggcttgtttcacttaagataatcccctccagttgtatccatgttgctataaaagacattattttattcctttttatggctaaatagtattcaatggtgtatatataccacattttatttaaccattcatctgttgattccctatttttgctattgtaaatagcatttggaccacatttcaagtacttaattagtggccacatgcagcaagtgactatcacattggacaatgtagccccaacccactgtatgaccttgggtaagacttgcaaactgtcattgcttcaatatctccatctataaaatggggatggcaacaatacctcactaagagtgtaaagactgagttactgtgtgtaaagcacttcacgcctccccatcggtgcttcaccctggggctgcaatgagcacccaatcttagtgtcagatgacacagcacagcaagaccgaggcccttggttcaggaaagtccatgctgccacctcttcagggtcaggaaagtacagtttccacctcttacaaataggactgtttgtctgctcctcctgggtcaaagtaacttcgggttcaggtcctggatccagcaaagggtttgcttaacattgcaagaaagatgttgcctcatggtcaaaagtcaggcgtaggatgagacaggcagacacgcacacattcacacccacgttttgcaaagatggactgaccctgtcagaggatgtgtgggtgaaggtgcacagtgaggatagagacatatgggagtccagtagacatcaatcaaactggactcagtttgcacacacctggagctcaagagtctccagggggaaaacagagacacaaagtcagacagagagagagccagagaaatttcctgcaccgtgaagatagtcagaggcagggaagaaactccttagcactagttagagtgatcagaaaccaagaggacctgatcgctgtacctgccaggtctcagtttctgtctccttccaactgaccacctcttcctctgagactcaccagttctgcatctcttgctcctccttctgtttctccgaccacttccacctgtggctgtcacagaagggcggatgaaggaggggacactggagatagactcagcatctgcaggcttccaaagagaggggctaggagatccaccaacacaccagcacaaatacaccagcacacacagatacacacaattggttcatgtattgctaggttacagtttgctatgctacaaaggcagtaggccaaatttgattgaattgaataattccttattttcatcagcttctcctttttttttttttttttttttttttgagatggagtattgctgtgtcacccaggctggagtgcagtggtgtaatcttggctcactgcagcctccacctcccaggttcaagtgattctcttgcctcagcctcccgagtagctgggattaaaagtacccaccatcacgcccggttaatttttgtgtttttagtacagatggggttttgccatgtgggccaggatggtctcgaactcttgacctcaattgatctgcccccctcagcttcccaacgtgctgggattacaggtgtgagccaccgcacccagccagcctctcagttttgaacatgcactaccaccacctccacaacacacaaatgtaaatgcactttcgtatataaaactgtataaatacaaggaagctcatacacatgcaaggatacacacataagcacccccagattcaaccacagaaatatacgccagtacatttgcataaattcaaacacccctttacatgtaaaaatcatataagcacatacagggatgcaagcaggcatggacaaatgcatgcaagcacagacaaacagacaaagctaagtaaaaaagtgcaagctcacctatgcttacaaaaatagacatacatatacccacaaacccacacacccacacattcacttgctcacctggactttgatatctctaccactgtatccctgccaatatctacagagtgggtaaagggataggcatcaggtcactgggttgcccaagcaggaagtctgggttccctaacaactttttctaagctaatgctcctggatgatgatgaaaaaggaggtggggaatggatgaaattttataacagggtgcagaggcagggtcaggataaaaggcccagttggaggctgcagcagggtgcagggcagtcagaccaggaccatggaactcagcgtcctcctcttccttgcactcctcacaggactcttgctactcctggttcagcgccaccctaacacccatgaccgcctcccaccagggccccgccctctgccccttttgggaaaccttctgcagatggatagaagaggcctactcaaatcctttctgagggtaagacacagacgaatggggtctgagggtgagctgcttcttgccttggtacttggggaagcttcaccaaacagaatgaggcagacttccagagtcaggggtggcacgggcatggttggtgagtacggagcatggtgaagcatgatgggtggtattattaggagaaaagcatcaaattaaatttagcagagtttatttgagcaaagaagtgactcatgagttggacagctccctaaaccaggaaagacaccacacggcagtatggtcaagtggtatttacaggcagaaaaaggaggtgacatacagaaacagcctgattggccacagatcacagcttgccttacttggtcacaatctgagcagtttgcagcctgtgtggactgaaagcccagctgctctgattagccaacacttggctacttgtcacaagaatatattcatttgggccaggtgcagtggctcatgcctgtaatcccagtgcttttggaggccgaggtggtggatcacctgaggtcaggagttcgagaccagcctggccaacatggtgaaaccttgtctctactaaaaatacaaatattagctgggcatagtgatgcgtgcctgtaatctcagctacccaggaggctgaggaaggagaatcacttgaatccaggaggcagaggttgcagtgagccaaaatcttaccactgcactccatcctgggtgacagagtgagactccttctcaaaaaaaaaaaaaaaaaaaagaatatactcccaagttaggttgcagttcactctacagagagagctttaggtcaaatttaatttaattaaacaattctccccttttggtcagcctcaaaattttgagattgaccaaaaccttgggcatcaacattacttctgtcaccatcataatggacttgtctgctctcagtatggaattcacaatggacaatgtcaacgtagttgagtgattctttaccttttcttcatgtttttgttgttcccactgtaatgagcccactggatgtacaaagaatggctgcatatgagcatttaagactctttttttttctgagacagggcctcactctgtcagccaggctgaagtgctgtggcatgatcacgtctcactgcagccttgacctcccaaggctcaagtgatcctcctgcctcagccccccaagtagctggaactacaggtgcatgccaccacgcccagctaatttttgtattttttgtagagacagggttttgccatgttgcccagactggtcttaaactcctgggctcaagcaatccacctgcctcggcctcccaaagtgctaggattacatgtgtgagccaccgcacccggccaagactcttgagaaaatacaacacatcagggagactgttatgatggctctcaggagggtaatacgaagaaaatgaagtcactgggcctgtaataaactttgaggaatgtggacttgggggtatagataaggtccactgtccacagagagaagaaaggctgttaatagtctcttttaacttgagtgtgtccatgaaccaaactgatcaaaatcgaataattcgaagttcagacaataaagatagttcaatagtattagagtccaattggtcatagattttgttcagggcatgatggtaattaaggaccagagcttgctataaaataacttgatttatagagacattcatttgtagttggcctggtaacatatagtatcctggagacccactagaagaaacattaagagtagaaaagtttgggatagccaggcttgctgtgttagtccattctcacactgttataaagacatacctgagactgggtaatttataaacaaaagggatgtaactgactcacagttccacatggctggggaggccccaggaaaatacaattcatggcaaaaggtgaatgagaagcaggaaacttacaatcatgatggaaggtgaaggagaagcaagtaccttcttcacaaggtggcaggaaaaagagagagagccaagggggaagagcctcttataaaaccatcagatcttgtgagaactcactcactatcacaagaacagcatgggggaaaccgcccccaggatccagttacctcctactaggtccttccctccacacctggggattacaattcaagatgagatttgggtgaggacacagagccaaaccatatcacttaccatcaccattcaggatgcttgcaaaccaactgctagctgcacctgtaaacacatatctgtttctttcccctgagaaatgtccttagtgtatttgtggcagtgtctagagaaacagcagtgtcagccgcattttaaattaagttatctgcactagtgaattcactggaaagataagagcaatatttggttttcttcagcaccatacacaagcctccaagatgggcatagaggagatctaaaattgcgtgatgttccattaagcgtttttgttgccacaaatgttctcatctcagtttggagagtggcttctacccatctgaactccttggaggttcaattagctgcaaaattcaagatgtcccttaatgtataacttagcctcagattccatacaactgtcacccaaataccaccaagaatgagcacccaggaacccaactggaaccttttctgaacagaaaccaacttatcttcgtcgattttgaggttgatagtaatttcagttattgactgttttggcttttaactatgggaggtattaggaaactctcagggaaacaatttggaaagcagcagtgagctaggccaaatagcaagttctggacctgtgaggagaaagaacagagtaagcaaacctcaagatactcaaggtaggcactcgtggtgttggaaaagagggtcacctactggcattagagcagagatcagttagatttgtttacccataagtctgcatagctcctgaacaaggtgggaaacttacttttttgtggtctttttctagcatgctgcgaaggtgcataaccacatttagttggaaagagactttactgtatttacttatttatttgtttttaatagagttggggtcgtgctatgttgaactcttggcctcaagcaatcctcccatctcaatctcccaaagtgctgggattacaagcatgagccaccatgcctggccactttacatatttaatccagtaacattacacacgcaattgcccacacccccataggtagtccccaggtcttgcatacgggatgcctggaagcaaaatatgccttttgcagccattattcagatacatttcctatatttagtagtgattatgttattagctagttaatagtatgttattacgtactgttattatattaactaactaataacataatcactactaaatatttccagtgagtgcaaaaaagcaagtggcaatgatgtctagaatatcaagatatagctttccactcctcctttggggtttctgggtgattctcattgggaacatgaagaggcattggcaccagtgaaattatttcctgattttggggcgttggttcagaaactcaacaactccttgttttttttgtttgtttgcttgttttgctagagtataagcctttgctaaagccattcacagattatagtcctatggattttcttgtaaggaaagggaaagggttaggacagcaagaaatggggaagaaaggataaaagataatgctttcatgatggaagagaaatcttgatccacaatcttggaaaagctgtccgcatataagatgccaactgcttctggggaaaaacttccctggtcagctttgccttaaggtctccaacagacatacagttctaggagtctagaagggtcctttccaatggagagatgtggatccaagatccgagaccctgacattttgctacagagaagaacttggcattgtccttcccaatggagtacaaggaacagtcttagaagaacttggtacggtctcttccaatggagttcaaggacagtttgtctggtgtcatttccaaagggcccaacctctaaattctagatcatgaaaggtctggttgtcatcaaccgatgtgtcatcaatgactcattttacctggtgaaaacatgctttggcataaagtattatagccttgcattattgagtcatatcagagtttataagagtgggagatacatgagattctattattaggggcataggccctctattactattttacaagagatctatctatgtctttccagtaggagtggatctgattgccatcaatcaataatacctgagaccaagggactccaatcaattcagcatgctttgcctaatgatatttgtttgtaatactgttgcgggacaatcaaagactggagagaccaaaaaaggttcaggagagtttattaaattaaggtgatcaccggttcagccagacatacatccagaaagtctgagccccgaacaaaggcttttcctacttttaaacatattaaggtgggaactacatgaggcaggaagccagtttcagaagtgagaaacaaagcagttaaataacatttcttacatcttgagaaagacatgtcttgcaacctaaccttatcggtccggtgaccctgcagctgtgcaggaactcactgggcctgtaataaactttgagggatgtggagttggggagtataggtaaggtccactgtccacagagagaagacaggctgttaatattctcttttaacttgaatgtaaggtgtggtcatactttgcagcaaccttaagaggattttaaaatttatattactactactattaggttatagttgatttcattaattccttcttcaataccttatttaactgttttaccacttgtctagtgaaacaagtacctctgtcactggagagttctccaggaatgcccagtaaggaaatacattttctaataaccttttatctacggttatggcattgattgatctttgtgcatagaaatgctttaatacaaccagaaaacatgcaatgaagctggcagttgaattaactccagcttcaagtgttcaaatgatctaccaagtgccagaaatatatcacctgaggtttttgttgtcttactagaattatggatttgataaaccaaatattagttataaaccatttagtaatcttagaatagtcacctcatcaatattttttcactgtttggatcattttctctcttctatgatgagtcatggaatacggagcttttagtaatggaaattttaagaactcaggaaggaccaggcggccatctagggtctccatgagtgcatgcttcacattggaattacagactctaaagtacaaattttaatacaatgagttgcaatttatgcttctctaattcaggtacataacactggtttattaaataggttatcataggtaatttgatggtgccattgcactccagcctgggtaacagattgagaccctgtctctgaattggaactgcacgggggcactgtccttggaggggtgaatgggcatgaagaggtgtctgggtatgagccacaggtatagaatttcactcttctctgccatcctctgttacatcctgggtacctgcctgccactgaaagaatgaggtaaaagaggtggtggcacgaatcaaatagatcttgctgtgccaatgagagagagcagactagcccatgtcagtgccaggagagtggaggagagagggagagcaggagaggagtgtgggtagggagtgctcatcaacagtacacatagtgccctataccggtaactgccactggctcagtatttacctgggttatcactgcttaccatgcctgattttatgattaattatctacttatcattactaatccatcaacccactttccaatgggagaattagaacactgacaataccttccagctcctcttccccttccccctcccatgttgaccatactcctgaatcttaggctcgttatccttttactattaatagagttatttttttaatttctgatcaatggtctttttaatgataccaagtacagagtatatatgccaatactactatgaatttttaaattatttgctcagacagaatacatggacatacaaatgatgaatgtgataattgtcatacatatatatttatcttagacacttagtcaaaacatgtggtctttggttatcagttagacactgtcactttacctggaagatacaaggtaattggtcacagactctcaaattatgaaacatttagatttttcaggggaatgacatggagggagccaaggagtcttatgattagataagatgttgtttgggtggctcacgacaccactgggcaacactcaaagaggtggtggcttatacctgtaatcccaacactttgggaggctgaggtgggaggatcgcttgaagccaggagttagaaaccagcctgggcaaccaaacaagacctggctctacaaaaaagttttaaaaatttagccaggcatggtggcatgtgcctgtagtcccagctacttgggagactgaggcaggaggatgacttgagccttgtagtttgaggctgcagtgagctatgatcacgtcactgccctccagcctgggcacagagcaagaccctgtctcttaaaaaaaaatcatctgcaatgtgaggagtgataacatttaggaacgtgtgtataggtttaaatgctggtcaaagacatcctacacaattcgctgaaccttctctctaagggttttttcccaagctctgcagacgctatctgggcacaaatcatgcctctgttaacagaatttgctgttccttctagctcttggtatcccactgcccgctttctttatgaaagctggtatggtcattgaatatcccaatcctttacaaatttggaaacaagcaaaactgtcaatgaaatttgtatttgcctaaaatgagttttctttctttcttttttattattattatactttaagttttagggtacatgtgcacattgtgcaggttagttacatacgtatacatgtgccatgctggtgcgctgcacccactaactcgtcatctagcattaggtatatctcccaatgctatccctcccccctccccccaccccacaacagtccccagagtgtgatgtttcccttcctgtgtccatgtgatctcattgttcaattcccacctatgagtgagaatatgtggtgtttggtttttttgttcttgcgatagtttactgagaatgatgatttccaatttcatccatgtccctacaaaggacatgaactcatcattttttatggctgcatagtattccatggtgtatatgtgccacattttcttaatccagtctatcattgttggacatttgggttggttccaagtctttgctattgtgaataatgccgcaataaacatacatgtgcatgtgtctttatagcagcatgatttatagtcctttgggtatatacccagtaatgggatggctgggtcaaatggtatttctagttctagatccctgaggaatcgccacactgacttccacaatggttgaactagtttacagtcccaccaacagtgtaaaagtgttcctatttctccacatcttctccagcacctgttgtttcctgactttttaatgattgccattctaactggtgtgagatggtatctcattgtggttttgatttgcatttctctgatggccattgatgttgagcattttttcatgtgttttttggctgcataaatgtcttcttttgaaaagtgtctgttcatgtctttcgcccactttttgatggggttgtttttttcttgtaaatttgtttgagttcattgtagattctggatattagccctttgtcagatgagtaggttgcgaaaattttctcccattttgtaggttgcctgttcactctgatggtagtttcttttgctgtgcagaagctctttagtttaattagatcccatttgtcaattttgtcttttgttgccattggttttggttttttagacatgaagtccttgcccatgcctatgtcctgaatggtaatgcctaggttttcttctagggtttttatggttttaggtctaacgtttaagtctttaatccatcttgaattgattttgtatactaaaatgagttttcaaaaggatctttgtggctaccttattagttcatagaaagtggaggcttgtctggaatgatattaaagaatttttttcattttaattgttttagagacagggtctcagtctgttacccaggctggagtacaatggcacagtcatagctcactgcagccttgaactcctgtgctcaggagattctcccaccttagcctccagagtagctgggactaaaagtgtgagccaccatgccccactatttatttttgtagagatgtgtttgggggacggtctcactatgttgcctaggctggtctcgaactcctggactcaagcaatcctcctgcctcaacctcccaaagcattgggataagttttgcatagacatgtttgaccctctcccttcctttattgcagcaaagatttccattttctcacagggaggacttggggcaaattgtttttgtcgttgttattgttatttgaggatgtgggtgggtcatcttggttaatgtcagtgcaagaacggtgtctgctcctcattattggggttccttagctattcaggcaggcagcagctcccttgagaagacttcctgacccccaggtccccatcatatgctctcatacaccagctgcccctccttactgagcctatgtccttgatagtgctgcatttacctgtgatcctgtggctgagctctccctcacacttccagacaaggaaggcctgtgaggtatcagcacagtgctgaacatagtacctggtacacaataggcatttagtaaatatgtgaacaggaacaaatgaaggagtcagtgagtgaaagctccaagcctgactcagcggaactggcagtcggccagggcctacaaagtgctgcctggccctcagtagggggtggcagatctggggatccctcttcaccaaatagagttgcatcatacaggtaaaggtcccaagtgcctattgttttcttttcatcattttccatgtgtgacaagagtatcacgcaatcatgtgaatcaatggacttagttttctcactagactaatgtgtctaggaattatctgtgttgtcatggggattttccaggtgtcatttacaactacctgtggacaagatgaggtgctaccctcatcttagaattagggatggtggctgggcatggcagcccatgcctataatctcagcactttgggaggctgaagcaggtggatcaactgaggtcgggagttcgagaccaacctgaccaacatggagaaaccctgtctgtactaaaaaacacaaaactagctgggcatggtggcacatgtctgtaatcccagctactcgggaggctgaggcaggagaattgcttgaacccaggaggcggagtttgccctgagctgagattgcatcattgcactccatcatgggcaacaaaagtgaaactccatctcaaaaaaaacccaaacagaaacaaacaaacaaacaaaattagtgatagtgatgctcagcctggggaaagcatttgtccagtggcacacaactgggaaaaggggaagctgagatccagcaggaggtctgtctccaaagccctcctagactaaagctgcttaacaatttgtggattatgaaattctcatagagtttgattaaagctgtggccccctcttttccaaataggcacatacatgtttgcataaagttgtgaggcttcacacactccctaaaactctttcataaaccttccaaggatcctctaggtattcacgaccatctattatgattgcatctcttgggggtggggtaaagagggagggcatgagcaagtgtgcatcagggctgaggaaggtggcgctgttgcttctccatttcccaataagcttccagattctttttgatgtcagagggatgtgggctcgtgtctcagattcaacccgtatgcattgagtcacagttttctcttccgtcagttaagatcatgacaatgagaatgtgtgcccctaaggtggttgtgaggattaaatgggatattgcatacagctagtatataataagtgctcattaaatggcaactaccttgatccactcattcatttattcacgaatccaataacaattcactgggcactttctatgtaccaggaaatagtctaggaattgatgatgtggcatcttggacaagacatacgaggtcactgcgcttatggacattccattggcagagacagataagcaaaaaataaacagataaggaaatgttaggtggagaagagctacaattaaactaaagcagggggatatttcagacagtgatgagaactacgttagattgagtggttaggggaagactgtcttgtttttttttctgagcagagacaatgaaagattcaggtggaaggcactagaaggaggcaggggtggctacaagaatcctgaaacaggaaaaatgtcagagaacaacatggaggaatgagtgggaggagaagtcagagcggtaatagggccacgtcatgtaggaccatgtgaaccctcagtggagacttcagatcttattctcagcaaagtgggaatattgtaggccttggtgagcacgtggatattaattattttacattttagtggggttaccctggcttgtggggcagtgaaacaattgttaagtggagtaagcatgtcatccagaagtccagtgaaggggctttgcagagatcaatgcagggcatttgtaagtaaacttaacaaattttatgacttttatgtcaagtttttattgaacttgaacatcactgtaaaaagcgcacagctcaatgaattttcacaaactgaacatactcatgtaattgacatgcaggccaagtagcaagaatgccccgaaaccctgcaccctgttcttttctattcactatccacctaccatcttgatcatgggttgattttatctgtgtatgaacttcttttttgtttttgtttgtttgttcctgagattgaattttgctctgtcgcccaggctggagtgcagtggcactatctcgcctcactgcaacctccgcctccccgggctcaagcaattctctcgtctcagcctcccgagtagctgggactacaggtgagagccaccatgcctggctaatttttgtatttttagtagagatgggttttcaccatgttggtcaggctggactcaaactcctgacctcgtgatcagcctgcctcagcctcccaaattgctgggattacagatgtgagtcaccacgcctggccctgtgtttgaacttcatacacataaaattatgatgcattgactcttttgtgcctagttgcttccactcaacattatgcctgtgagtttcagccacgttgtcgcctgtagctgtggtttgttcttttttgttgctgtatactagtctattgtgagaaccctcactgattgtctatatctatattgatgagcattttattaagaaagcttctgtgaatattttgttcattttttggtgaacacacatacacatttttgctgggcatgtacctgggagtgaagtggctggtttcctgggtatccatttgttcagcttcaggaaatactgcccagcagttccccaagtggctgcacagtaatcccaccttatccactggagatatcttctgagacccccagtggatgcctgaaaccccacataatactgagcactatgcatactctttttttttcctatacaatcacattatatagggagggtggtatacacagtgcagacatggtggacaaaggatgattcgtgtccggggtgggacagagtggatggtgagagatatcatcatcctactcagaatgatgcacaacttaaaacttacgaattctttatttctggaattttccatttaatattttcagactgcgattagctgcaggtaactgaaactgcaaaaagcaaaaccacagatcataagaagtatgcggtgggggtgatattcatcgtattttatcaaccatctttactgtttagggcacaagccaatcagagcagaccctggctgggccacccattaacctaagcttgtccaacctgccttattttgttgttgttctgttttgttttgttttagctttttagcagcctgaagccatggttttcagtttctgtctccagtgatacacagaaaggaaggatgaggaaggggctttactggcccaaccagaaacggaaactaagaacccatgactgtattctctcccttggacagcgttaaccattaacccttaattgctgggtcccagcaggggaaagggcagcctggggaggcggatgttggggaggggctaattaccaatctggtatgtaagtattttgatagttttacaaatgaggtgtatgctgactaacagccacccctggtgtggatgtgattggcagttccgagagaaatatggggacgtcttcacggtacacctgggaccgaggcccgtggtcatgctgtgtggagtagaggccatacgggaggcccttgtggacaaggctgaggccttctctggccggggaaaaatcgccatggtcgacccattcttccggggatatggtgagagcctcagaggcactgggagggggcgggtggggggtgcatcagggaagggagtatatgggaggaagaaggactcagagccttcttccaacttcttctacaaccaacccacacctcccctgcaccccaggtgtgatctttgccaatggaaaccgctggaaggtgcttcggcgattctctgtgaccactatgagggacttcgggatgggaaagcggagtgtggaggagcggattcaggaggaggctcagtgtctgatagaggagcttcggaaatccaagggtgagtcctgggggatgaataggaaagaaagacaatgaaacactgagagatgcaggtgcacgggaatagaaagacagagaggtatataagggcacagacagagacagacgaaactggagacaccatcagacagagggatagagacagagagggagagagacaggggaatagagagggatggggatgggcaggagagaaacacagagagccagggaaagagagagatgccaggtgtataatgtccaagagttactcaaagaggctggatgtgatgactctcacctgtaatcccagtactttgggaagctcaggcaggaggattgcttgaggccaagagttggagaacagcctgggcaacataatgagatcctgtctctacacaatatagaaaagaagtgagccacgcatggtggtgtgtgcctgtagtcccagctactcaggaggctaaggtgggactacaggatcacttgagcccaggaggttgaggttgcagtgagctgtgattgtaccactgcactccagcctggacaacagagcaagatcctgtctcaaacaaacaaacaaaccctcaaagacatataatttcatggatcaattgtgtctgtcaaagtcaaaaacggaagttaagtaaaagaaaaaaactacagacatttaacaaataatgaactgtgttttccttgccctgggtgaagtgctgatgagctggcagtgagcagacaggccaggtggggtgttctgcccgggtgcagctggaggggtcatcaaagaatcactaggttatttttgagttctccataacttggtgtctgtgagacatgtaggtgaagggtctctggctagcacctccatctcattcatgccaggtgtttaccatctctcttatcaaaatttctcaagagactctgggatgtaaatgcagaggctgcatggggaggtagagacccaggagctatagggaaacggggacaagaagactgaagagaaggacaggaagaaacagtgacacaggcaggaggaaagagacagatggagggaccaaaacaaaaaaatataggttgggtatggggctcatgcctgtaatcccagcactttgggaggctgaggctggcggatcatttgaggccagcagttcaaaaccagcctggccaacatggtgaaaccccatctgtgctaaaaatacaaaaattagccaggcttggtagcacgtgcctttaatcccagctactcaggaggctgagacaggagaattgattgagcctgggaaatggaggttgccgtgagctaagatcacactactgcactccagtctgcatgatagagtgagactctgtctccaaaaataataataataataataaaataaagaacggcaggggggagacaaatatacacacagagagacagaaagaaacaaaggcaaagagaaattgaggcagagaaaattagagagacagacagacaaagcttaggaaaaggtctgcagaggaatgagagaagacaggcaagtgagaaccagagagaggctgcactaacctgatgttcttgggtccttacagaccactctccctccagctggggccagtgctgagcctggtgtatacaggtatcacttaacaagtacagaataattcccagaagactggagagccctagatgtggaaagaagagattaagggggagtaataggtaggggtggaaagatggttttttatttgttttaaattagagacggggtctcactctgtacccaggctggagtgcagtggcacgatcatagctcactgcagcctcaaactcctgggcccatgtgatcctcccacttcagcccctggactatttcaactgggactacaggcatgtgccaccatgtctagctacatttttttttttttttttttgtagagacagggtctccttatgttgcccaggctggtcttgaattcctgatccttttgaatcaggctcccgaagtgctgggtttagaggtatgggcccctgtgcccacccagggctttttaatttatataagcaattgattgaacacctactctgcccagcccctatccctgggatttaactgtactcactcccagagtcagaggtggggcctgagaggaggtgcagagtgagaaccggctgcatggactctatagctgtgttgcctgggtctaaatcctggcctcagtaatgagtagctgtgcaactttggtcaaattactcagcctctcggtctgcccatctataaactggagctaataatcaaattgcatctgcctcacattgttgtagtgagagttcaatggaattacgcgtgacgtgctggtacataattagctgttacggttattctcatgtttaccattactgagtgatggcagacaatcacacagagataggtgacagcctgatgttccccaggcacttcagtctgtgtccttgacctgctgcttcttcctaggggccctcatggaccccaccttcctcttccagtccattaccgccaacatcatctgctccatcgtctttggaaaacgattccactaccaagatcaagagttcctgaagatgctgaacttgttctaccagactttttcactcatcagctctgtattcggccaggtcagggagacggagagggacagggggtgtgggggtgaggtgaacacccagaacacacgagaaaaggatgacctgtcttgggggctcagaaatgcagcttatccttggaagaaacgcagacatgtgaagaatcagggacatggagacctggagggaggagagacggtgagacagggatagagacactgagagagagaatgaggcgtgatggggaggcagaaatagagtcagagagagactgagagaaggaagatgagcaaaaacaagacaaagaagagcagaaatcaagagattctgagagacagagttgatgagaatgagtgtgaaagagagggagagagagagaacgaataaggctttgggcttcatgtctattctgctcctggatgtcatttctgttttattttttttagacggagtctcgctgtttcattccagctggggtgtagtgttgccatcttggcttactgcaacctccacctcccgggttcaagtgattctcctgcctcagcctcccaagtagctgggactgcaggcatgtgccaccacacctggctaatttttttttttttcttttcgagacagagcctcgctctgttgcctaggctggagtgcagtggcacaatctcagctcactgcaacttccacctccctggttcaagcaattcccctgcctcagcctcctgtagctgggattacaggcgcctgccgctatgccaggctaatgtttttgtatttttagtagagacggggtttcgccatgttggccaggctggtctctaactcctgacctcaagtgatctgcccgcctcagactcctaaagtgctggaattacaggtgtgagccaccatgcccagactgcttctggttcttctgtatccttgcttctcagtctttggtaaagctctccacctaaagaaaatgaaggataaatgacaataaggaacagcatttcttcattttctcccatttctccttctccctctgtgtttttttttttaactttccccagattgtaaaggcagtcttctgctcttttaaaacaaaatactaaaatgtctccttatttattaacctggaaatatgcctattacatattaaatttaagaatatcaagctgcagaacagtatgcatagctgtagtttgttgttgttgttgttttcagacagtatcttgctctgttactcaggctggagtgcagtagtgtgatctcaactccctgccacctccacctcccaggttcaagcaattctcatggctcagcctcccgagcagccgggactataggcgagcgccaccacacccagctaatttttttgtatttttagtagagatggtgtttcaccatgtcggccaggctggtcaacatagctacagctattaagcagggatgtatgttggattcacatgtggggttgtcacagttatggattttcaggaccctactttctgggcggtctgatctggaaagtctgggatggggcccaaggtgagtacttgtaacaagcccgaccagtaattctaatgttctcctcccaccgagaaccacagagaaaagtctggaaggagacccaccagacagttaacaatggttatctctagaaggagagattaagaaggaaatttacatctgactatatatgtttgcatttttgcaattatttgcaataaattaggcattccattcttcatcaaagtaatagaaataacctccaaaatacgtagtcctaacatgtcagcaggcttatcttgtgtaagaatcattttattaatatctgacacagcaagggagatgaggagaggtgggaagagggagagaaaagtatgagaaagacaaataaacaggctgaggtagacaatgggtgacacagaaaggaagtgagacagagactaagagagatagaaaggagagaggcagggagatggggcagaggccaagaaaaagacagaaggatgagggaggaagatgcagaaagaggtaaatgtgagatagatcaaaggagatatagagtcagtgagtgaggggttcagaggcagaggggagtggggaagtggggttcccatggagggattggggcccaggaggcgctctctccctgtgacctgctagctcagccctaggcaaacctcaccaccccttctttcttgcagctgtttgagctcttctctggcttcttgaaatactttcctggggcacacaggcaagtttacaaaaacctgcaggaaatcaatgcttacattggccacagtgtggagaagcaccgtgaaaccctggaccccagcgcccccaaggacctcatcgacacctacctgctccacatggaaaaagtggggtctgggagaggaaaaagggaagggaggggagggagggcaagatggagaggtgagaagagggagggaaaaggggtagggaaggggaagatggggagggaagaagaaagactagggaggggagaatagggaaagggaggagagaacatgaggaaggaaagaaagatgaggtgaaaggagggagaaaatagggaggaggaactgagacagggagagaggggaggtgggaagacagaatgaaagacagagggagagagagagaagactggctgaggaaggaattcggggcaagggacaaaaatacagcaacaagagaaaaaactcacagaggcagaaagagacggggacaaaaagagagaaacacatcaaagagatgtggagagagatagaaacagagttaggaagactaaagagaggctgagagagatgagttagagatacgcggttggatgtgtagaggacagagaaaagcaaactgggccagatagtgtcaaagacctttaggccaacggagggcagccagggagatgggcgtatacacagcaaggctacagcctcccctgaccctccccttccttccctactgtggacgcaggagaaatccaacgcacacagtgaattcagccaccagaacctcaacctcaacacgctctcgctcttctttgctggcactgagaccaccagcaccactctccgctacggcttcctgctcatgctcaaataccctcatgttgcaggtgggccagggacagccagtcaagggggtcttctgacctccttctgagctgcagaaatggggctatgggtaccacctggatgagagaggggatgctggcttcctattctgggagcactgtaggctctgggctagattccaaccaagccaattctgttggtggatgcatggatgcatgaagaatctgtccatgcgttctcccactgttttcttccatcacttaaggattttttgttctaaggtttttgtttgtttgtttgttttttgttttttggtttttttttttttgtcttttttgagacagagtctcgctctgtcacccaggctggagtgcagtggcatgctcttggcttactgcaagcttcacttccagggttcacgccattctcctgcctcagcttcccgagtagctggaactacaggcgcctgccaccacacccggctaattttttgtgtttttagtagagatggggtttaaccatgttagccaggatggtctcgatctcctgacctcatgatgtacaaatttagggggtacatatgcagttttgttacatgcgtaggttttgtaatggtcaagtttgggctgttagggtatttatcacccaaacagtgtacattgtacccattaagtaatttctcatcattcaccccccttctgctccctcactcttctgagtcttcactgtgtatcattcctctctctgtgtccatgtgtacacattttgtagcactcactcatgagtgagaacatgcaatatttgactttctgtgccatcacttaaaaatcgatccatccacttatcatttcatctattcattctttaattcattaattaaagaatgtataattactgattctttcatttatgattcatctaaggacatatactgtcattcatttatttggattacttgatccacaagttgatcctttgaaacagtggtatgttgatggactatttgtcattgattcattggctcattcattcattcattcatgcattcatccatccttctacgaactaggtttcactcttatccttccatgagtcaacctttcaattcacccttaatccatccgtgatttccttcatttatcacaataattcactcatttattcacctctgatctacttatcattcaatccagcctttcatttactcctttatttactcatacttcactaatttaattattcacttgctcttccataaatctagccattcatgtgattattcattaattgggttcattgatttctttgtctatggatcattcattagtgattaattaatcaatccatctattaattgataagtaaatacagacatccatttattggtttgttcatttattcatcaatctttccatccatgaattgatctattgattgattgattgatgtttttatccagttgttcatgaattcatctattgttctattacactgttatatacctgaggaccaagaatagtgtctcaactatattataaacacaataaatattagttcattttctactcatcttagagagggtgttttgagaggtttgtagcctggagttcttaatctgaaattccatgcaaaatcgtggtgtgtgtgtgcatgtgtgtgtgtgtacctgggcatgtgggaagaggatctgtaatattcattagatttcaagcagtgagaattcttgttgcttcctccctcctcccctcaccccatgctgattactttgaggggtatcaaggatctaaccctttactataggtttttcattggtcaatagaaagtagtgtccttgctgaaaggtctctttttaaaaaaatttttttttcttttgagatggagtcttgctctgtcacccagtctagagtgcagtggcatgatctcggctcactgcaacctccacctcctgggttcaagtgattctcctgcctcagcctcctgagtagctaggaatacaggtgtgcaccagcacacccagctaattttttgtatttttaggagagacgggattttgccatgttggccaggctcatcttgaactcctgacctcaaggaatccacccacctcaacctccaaaattgctgggattacaggcatgagccaccatgcctggcctgaaatgcctctttaaaatgagattcattggtcttcttttctgtacagagagagtctacagggagattgaacaggtgattggcccacatcgccctccagagcttcatgaccgagccaaaatgccatacacagaggcagtcatctatgagattcagagattttccgaccttctccccatgggtgtgccccacattgtcacccaacacaccagcttccgagggtacatcatccccaaggtaagaccggctggaaccccatagccctcctgtttgggcatcctggattctcttaatccccgaactcaaccttttgttagctccttaattgagtcccgttgtttttgttttttgtatttcttttttgtggagtgtgtggagggttggagggaatggcaatatcttttgatcttgtgatcctccctcaggacacagaagtatttctcatcctgagcactgctctccatgacccacactactttgaaaaaccagacgccttcaatcctgaccactttctggatgccaatggggcactgaaaaagactgaagcttttatccccttctccttaggtaagctggacccacaatttctttcccagacaccagagggcaggtactatccccaacttgagaaaaacaacgagagatactgattatttgagcacttaatatattctgattgcttcacctgccttatcccattccatcttcactacaaccctataaggaggcttgagaaagaagattacattcccaaaggcacatcttggcaagcaggaccttgggcaagtattttaacatctctaaacctcagtgagttcattttcttaaaaagaaaaaatctgttgggcaccactgtaagcccagtgctgtactgggggctgaagataatgcatcaaacaagtcacacagagacagggttcctgccccaggaaatttaaagtccagcagggaagatgggcattcatcaaataataataaaataatcatctcatgaaatgaatgaatgcctgcaacatgcttagaactgcctggcacaaaggacatgctcacaagggcaattattattataattagacataattgtgataagtgctctaaagggagctttgggagcacaaaataggaaatagtagctaatcttgtggtgggtccgtaaggaaaagcttaccagaggaactggcttccaagctaacatgttcatgggtgagcatcaatcaaccattgcaaagtgtgttccaggcaaaggaaacagcaaggacaaaggccaaaggtagaaacgtgatatggcaccattgagaacctataggaagtccagtgagccttgggtgtagattgcagaaggaaataagacaaagggctcatctgggcaggaccttgaaggttgcaggaggagtttggatttatggtctagcactgggaaggtggaaaaggtcttgacgtgctctgacttgtcccagttctcatcctctactctttggctggttaaaagaaaaactttagacaaattaaacttagcagagtctatctgaacaaagaaacaattcatgaattgggcagcacaaggaaccagtaaaggttcagagagctccatccagcaatgtggtcaggcactatttatccacagggaaaggaactgaggtactgaaacagcctgattggttacagctctgtgtttgccttatctgagcatgtctgggcagcttgtagcctgtgactggctgaagcttggctgccctgattgtccaaggttacttgttacaagaatatactctcaagtttgtttacatgttgagttacattacaatttgttatgtagggaggctgctttaggccaaatttaattgaatttaacatgcaccatccatgaaaggccccagaaacaaacccccagtcttgagtttcatcagtgacttcagtgatccagggtttggcccagcccccggttttgcgcagtacagtgacctccttccacattttatcttcaatgaaaattgggaacatgtgtggtgatggcttgaatgtcaatgtcttctctcaattttgctatctgaagtttctttttttttttttgtcttcagacggagtcttcctgtgttgcccaggctggagtgcagtgtcacgatcacagctcactgcaacctctgcctcccaggttcaagtgattctcctgcctcagcctcccgagtacctgaaactacgggcgcatgccaccatgcctggctatttttttttatttttagtagagactgggtttcaccgtgttagccaggatggtgctgatcttctgaccttgtgatatgcccacctcagtttctgaaagtcctgggattacaggcataagccactgcgactggcctgctaatttgttttaagagaggcagagatgtagggaaataaggacagagacagataagtaacaaagataatgagactgagaaacagagttagggacaaagagggaacacatagagatagagatggggagccagtggcagaaagacagagggcaaacctcagacagtatacagagaggaagagagagagacacagagagagagagagtcacgtaaggagaaggaggaggaggaggaataagaggagagagagtaggaaaaggaaggaggaggggagaaaggagggaaaggagagaaacagaataagagataggaaaaagagagagtgacataaaaagagaggaagaaagaatgaacaagacaaataaggtatctttagagggagatgaaaagaaagaatgagagagaaagagattggggagaaatcagattcaaatagatggagataggaagttaagcaagatggaagaaagccaaaaaaaggagaggaaaagaagaaaagctgtgtctgacaggtatagacagagaaaaagacaggagtagggctgccaggggcagaaagaaaggtataacccaagccaaaagggtactgcagccaaagaaattcgaaaggtgtccaaacagacggccccagagatggggagggcgtgatgagagggagataataagcctcaggctgttgtgaaaaatgttaggtcacacaaagagttacagaagaacaggcccagagacctgcctgtttctaagctcatgtcacccaccttctgggtatgccaaagggatgtggacacttttccaaacacctccacatagacacacttgtccaacaacttgacaggcatagggaatgcctgaaaactcacacttgacatggcctttccaaggtttgcagattatgaaacactgaagtgaagggaaaggctccctttgtctctgcctgagctttttccagcaccctttgttcttatttttctcccaatctgtggtttagaatctactgggggttccttgcacctctgagaatcagtggaagccatagaccctccctgtctcatacgcatcagtcccattcacaatttatatacaattgggcttttccccccttgagctcttgaagcctgtggatctcaggctgagactagaagacagcctagagacacagacacagacacatggccagaaacacataccccacacataccccagaaacaaacacaaggcagtaaccaaaccttaagcctccttagcacaagccaagtgctattctaagaatttttacaattgtctcctttaacctcacaagagccctttgagggaggtgccattctccccatatgagaagtgaagaacactaagaatgttgtcataaatgtgctcacactcacacatgtacaggtacacacacacacacacacacacagaaccagaaatgggtcattatactctgtgggtttcaccaaccctttggaactgtaacagaagctagaaactctcttatataaaaatgaacatggcgccgggtgcagtggctcatgcctgtaatcccactttgggaggccaaggcaggtggattatctgaggtcaggagctcgaggctagcctggccaatatgatgataccccatgtctactaaaaatagaagaaattagccaggcgtggtggcaggtgcctgtaatcccagctacttggtaggctgaggcacaagaatcatttgaaccacctgggaggtggaggttgcagtgagccaagatggtgccactgtgctccagtctgggtgacaaagagagactccatctcaaaaaaaaaaaaaaaaaaaaaaaaaaaaaaaaaaagagagagagagaaatgaacgtggcacatccactcaaagatttgcatctggtttcagagcagcttcctaaaagtccaccctgaattgtaggttaaaggccagtcttatgcaaatctgttgcagtggacatttgtgtctgggcttagggacatggcagagcgaagtgtatgcacctgccctgtgcccacactggtgaccttctgtgtccacagggaagcggatttgtcttggtgaaggcatcgcccgtgcggaattgttcctcttcttcaccaccatcctccagaacttctccatggccagccccgtggccccagaagacatcgatctgacaccccaggagtgtggtgtgggcaaaatacccccaacataccagatccgcttcctgccccgctgaaggggctgagggaagggggtcaaaggattccagggtcattcagtgtccccgcctctgtagacaatggctctgactccccgcaacttcctgcctctgagagacctgctacaagccagcttccttcccctccatggcaccagttgtctgaggtcacattgcaagtgagtgcaggagtgagattatcgaaaattataatatacaaaatcatatatatatatatgttcttgttttttgagacagagtctcacactgttgcccaggctggagtgcagtggcgtgatctcggctcactgcaacctccacccccggggatcaagcaactctcctgcctcagcctccctagtagctgggattacaggcatgcactaccacgcttggctaatttttgtatttttagtagagatggggtttcactgtgtaggccaggctggtctcgaactcctgaactcaagtgattcacccaccttagcctcccaaagtgctgggattacaggcgtgagtcaccgtgcccagccatgtatatatataattttaaaaattaagctgaaattcacataacataaaattagctgttttaaagtgtaaaatttagtggcgtgtggttcattcacaaagctgtacaaccaccaccatctagttccaaacattttctttttttctgagatggagtctcactctgtcacccaggttcgagttcagtggtgccatctctgtccactgcaacctccacatcctgggttcaagtgattctcctgcctcagcctctggaggagctggtatcacaggcgtcccccaccacgcctggctaaattttgtatttttaggtggtcttgaactcctgatgtcaggtgattctcctagctccaaatgttttcattatctctcccccaacaaaacccatacctatcaagctgtcactccccataccccattctctttttcatctcggcccctgtcaatctggtttttgtcactatggacttaccaattctgaatatttcccataaacagaatcatacaatatttgattttttttttttttttgaaactaagccttgctctgtctcccaggctggagtgctatggtgcaatttttgttcactgcaacctctgccttccaagatcaagagattctccagtctcagctcccaagtagctgggattacaggcatgtactaccatgcctggctaattttcttgtagttttagtagggacatgttggccaggctggtggtgagctcctggcctcaggtgatccacccacctcagtgttccaaagtgctgatattacaggcataatatgtgatcttttgtgtctggttgctttcatgttgaatgctatttttgaggttcatgcctgttgtagaccacagtcacacactgctgtagtcttccccagtcctcattcccagctgcctcttcctactgcttccgtctatcaaaaagcccccttggcccaggttccctgagctgtgggattctgcactggtgctttggattccctgatatgttccttcaaatctgctgagaattaaataaacatctctaaagcctgacctccccacgtcaagaggtgatctgtgccattttgtgtgtgattcttttattgtcgggtctctagggatttttctggaaggaatgttggtgagaatgcctctctcacctcaatgccaactctgtgaagggccaaaccattgtcttgctcatccctgtactctcaacacagcgtgtggcatatgacaggtgttcaaaatatttggtgaggaatgaatgaatgagtggctaaatcagccaccccctacccccacagcccacccaaaatggagctaggcctcctccatcagactatatctcctccatatcccactttcttgtgaggtccagaataaattctcatccccaaagggcccaggatgcccccattctgcctaccagttactctcgataccccgtgctgcaatgccaccttttgataaagcttagcgctattcttgcagtggaaccactctaaatccagcctccaggctggacgcggtggctcatgcctataatcccagcactttgggaggccgacgcgggtggatcacttcaagtcaggggttcgagaccagcctgaccaacatacaaaaaccgtgtttcaactaaaaaagatacaacaattacccgggcatggtggtgtgcatctgtagtcccatctactcgggaggctgagacagggtgatcgcttgaatgcaggagggagaggttgcagtgagccaagttcccgccactgcactccagcctgggtgacaaagtgagactccgtttcataaataaataaataaataaatccagcctccaaacattccaccagcaggaccaccacccttccctgagggaggtgctgcaagtttaatatcattatcacaaggatacatcagccagcctgtggccagtgggaagctggccctgggactccaccctgagatgctaaccttttggcgtctgcagcatctgccatctttgggctccttgtagcctctgaagagttaacagagactctgccagtacaaatgcatggcacacattccctcaccaaccacagaaataacaaacagagcaacatgtcttttaagagcgacagcagaatggaaggcgggaagaatgaggaccacggtgccctcagccttctcactcctcattgtccccagtggcctcttgctactctggttctggggccatcccacctcccagggctgcctctctcctaggccctggcctctgcccttcctgggggagcattttgcaaataaaccacagggctttctgaagtctgtccaggtggtgagatgggagagtgtggaagggatggaaaaggaggaggtgggtagacgggaaacagctcacaggcagcaaggcagttggggtcgtactttgggtgggattccacagacaagcttgggaattcctttctggcttatatattaactacagaagcttctggaattttataaggtgaaatggagaggagacagactggagggtgaaattctgatagacttgaggctttgagatgtggtcctggggtggagcaagacaagaaaagtactggagattggggtttgaggagtctatgcaattatttttatttttaaaaatctttgtggctacatagcaggtgtatatatttatgtggtaagtgagatatttcgatacagacatacaatgtataatcacaggcatacaatgtagacaggcataaagtgtatagtcacatataataataacatcatggtaaatggggtaaccatcacctcaagcactcatcatttctttgtgttacattagagttatattccctctgttatgctaaaatgtaccacaggctgggcacagtggttcatgcctataatcccagtattttgggaggctgaggcagacagattgcctgagctgaggagttcgaaaccaccctgggcaacatggtgaaaccctgtctctacaaaaatacaaaaaaaaattagccaggcatggtggcatgcatctgtaatcccagctactctggaggctgaagcgggagaattgcttgagcctggtaggtggagtttgcagtaagccaagattgtgccactgcagtcccgcttgggtgacagagtgagactccatctcaaaaaaataaacaagcaaacaaacaaaagtacaatgaattattgctgacggccatcaccttattgtgctatcaaaaactagatcttattcattgtatcgaactctatttttgtacccattagccatccccagtccctcacctccacccttcccagtctctggtaaccatcattctactctatctccatgagttaaattgtcataatttttagctcccacgaatgagtgagaatgtgcaaagtttgcctttccgtgcctggcttatttcacctaacataatgtcctgcagttccatccatgttgctgcaaatagcaggatatcattcttttttaatggttgaatagtactcccttctgtatgggcaccatatgaacacttaggttgattccataacttggctcttgcaaacagagctgcaaaatacactggagtgcagatatctcttcagtatacggatttccttttttttgatatagatttagcggtgggattgctggattgtgtggtagctctatttttagtggttttctttctttttgtttgtttattttatttctttattcattttttttgagatggagtcttactctgtcacccaggctggagtgcagtggtatgatctcagctcactgcagcctccacctcctgggttcaagcgattctcctgcctcagcatcctgagtagctgggactacaggcacctgccgacacgcttggatgatttttgtaattttagtagagatggagtttcaccacgttggccaggctggtcttgaactcctgacctcagatgactcgcccacctcagcctcccaaagtgctgggattacaggcatgagccaccgcacctggcctattctacttttttttttctttttcttagggaaactccatgttgttcctcaaagtggctctattaatttacattaccaccaacagtgtacaagggttccatggggattacttcagattgagtggtcagagagggctcctttgagaagacttctgagaattggccatgggaaggtgtggggagaagccttctcagctgagggaacagcaaggtcaaagacccagaggtaagaaagcaagcttggaaccttccaggagcaacaaggcattggctctgataatgccttctcctgctaaaatgacagctctaggaaggcagggttcttatttcctgtctatctatctatctatctatctatctatctatctatctatctatcatctatctatctatcatatatctatctatccgtctgtctttatttatttatagaggcagagtcttgctctattgtccattgtattagtccattttcatgctgctgataaagacataccgtagactgggtaatttataaagaaaaaaagtttaataaactcacagttccacatggctgcggaggcctcacaatcatgctgaaaggcaaaagttgcgtcttacatggtggctggcaagagagagaatgagaaccaagagaacggggtttccccttataaaaccaacagatctcatgagacttattcactactatgagaacagtatgggggaaaccacccctatgattcaatgatcacccaccgggtccctcccacaacacgtggggattatgggagctgcaattctagatgagatttgggtggggacacagccaaaccatatcaccaaggctggagtgcagtggtatgatcatggctcattgcagcctccaacttctgggttcaagcaatcctcccacctcagcctcctgattagtggtgactacaggtgtgtgacaccacctctggctggcttttaaattttttggagagatggagtcttgctattttgcccaggctggtctcaaactcttggtctcaaatgatcttcccatcttgacttcccaaagcactgagattacaggtgtgagccattgcacctggctggttctcatttatttaagtattactgctgtcatggtttgctttggtccctgtgggttcccccaccctttgaaacaagtgcctgacacatggtagggttcacaataaatatttgtagaataaataagagctgagccttcaaggggtccaaaatacttgcacggagtttttctaggtgggcacgatgccacccagctgcaggactatttcagggtgttcattggctcctctggttgatcttttgatgcctgtataagaactcccacttctccaaatctgggggccacatctttagagttctcagctttctgtctctcaggaatgaaggagataatatcactgattggagccagattgtctggatgttgaatcccagctccttgctggtgcctttgagaagtgactttagccctccatgtgccttatttctgcctctgtaaacggagatcatcatagcacctctcatgtggggctgtttgacgattcggtgaggtatgtgcaaagagctttttgcacttgcaaaaagtgtctgggatatcattgtgtgctgtaagaatgagctgtaatgattatcactgagacttgttgttgggattaaaagagatcaggtctgtcagggcctggtacacaagaggtactagaaaaataatgggaggtttaggtgctccttcctccagatacactcgtaaatatgactgctgtgtcgtcatctactttttagggatatgaagaatctgctgtgtgaccttagatgaataaatctctgattcactctgggccttggttttccctgcctctgaaaggggtatgatgtttccttcccttttgcctgggcgcaggtactgggtgctttgtagttaagggagtatcagctggtggctcaagggtagattctaacaggaacttccaagctggagaaatactaggctacacctcagagaggggaggtgggtaagggaggcccctgctggtgtgagcaggaggtgggtgagggaggcccctgctggtgtgagctcgatcctttatccctgagcttcagactctcttaagccttcccacatgagaaactgacatccagatggaggtggggaccctgcaatgtaaagccaggtcacctgtccacagaggtgtgtctgataaccagggcatgataggttagagagtgtggtggctaaaagcaccagcccttggatcacctgaggtcaggagttcaagacctgcctggccaacatggtgaaactccatctctactaaacatacaaaaattagcttggtgtggtggtgggcacctgtaatcccagctacttgggaggccgaagcaggagaatcacttgaacccaggaggcagaggttgcagtgagctgagattgcgccatttcactccagcctgggtgacaaaagcgaaactctgtctcaaaaaaagcaccagccttagactcagagagaccaggatttgagcttgggggacctcagcttcctctctgtgtgacctcaggtaagccacttatactctttgggcctcagtttcctcatttgtaaaattgaggccgtgattgaacctccttcaagagctgttgtgagtgctataggggatactatcttaaagcacttaatgcagtgcctggcacatggtagttctgtagaagtgcttgctattttaattcacgtgcacaggtcctgcctgtgggtgagggctcagtagatggaacagcgatggttgatatagttgggattgtgaggattattatgacaggggctaatttgaatgggcctgtgttgtctgccctccccactgccagcctgatttccctctgcctggctttgcagctcctcccattggctgctggggtgtaccccttgcatgcggatgagaaacgagtcaatgaagtcccgtggggaattgggatccagcgtgcactggttgtgctccactttcttggcaatgaagtcctccagcccttgcagctccttaaaggcctgttgctgtggtcctggcaggtgtttcatcaccgaagagaacatctcatagagctggggttgcagagagaggatgggaagggaaggaccgctgtcaggaggcaggaactgatgggaatgggacctgtgtcagagcaagaaaggcactgggttaaaggcacctacctgcccaggtgtttaggtatttcagtggggctggatgggaacatatatgtaagtcttcatgagggttaagtgagaaggctactgtccagaaatttaggtaacatggactgaggcacacatccaggtttcaatgaaggtggattggagcgcacagctaggtgttcagacattcaaggcaggatgtgttggaaaacacctgttcaactgtttagctactcagacggggctggtatgaggggagtgtcacctgtctaggtatgtaggcattcaggtgggcctggttgaagacaactaccgagatacttattgggtctggattgggggcttttgttcagatgttcaggtattaaagtggggctggtgaagatgttgaagaggaggggatacctgttgaggtgtttacctatccaagtgggatgcactgggggcacctctgtaaggtgtgtgattggaaagggttggggaacacttatttgggtgtctggggaataatctgtctagatatttatgtgtttagggtattggttagggcacctgtccatgttttcaggtatttaagtgggtgaagtagagggcgcttggccagatattccagtgggctaatctgggacatttgtgtagatgtgaaatgattatgatgggctggattttgcagcaccaggtgttcaggtatgcaggaggcgggttgaggcagtcacttgtccaggtgttaaaatattcagaagaactgggtagggagcatctgttagaaattatggtaagttggggatgggaacatgtgcccaggtgagagagctgagctgagggtatgcatcctgccttcaggctctgttttggggatcatctgttgagctatccaggtgtccttggagactgggtattgggcacccatcctgggttctggtgcaactttccggttgtccaatattgggggctgattttgaggggacactgtctggaggggggtgggagtttggggcacctgtccccatgtaggggagcagttggcaggttgtggtaggggcgtgacagccaggctgcagccggttacctgccccgtggagggtgccgtgaactggaagctttccagcatcatgcacagcagtgacaggaacttttgtcctcatagtcaaagcggtccccaaagacaatggagctgatgacattggaggtggtacggcttaggaagaaggtgggatagatgctggagcttgcgggtgtggcggtgtattgggggagaagggggttgggaagagagtcaactcagagctctgatgctagtctgagaattccaggaggcactgccctgatgagccacattcccagcgccagactacagggctgggagcgcgggcgcctttccccaccaaggcccggtccccagacagaacgcgcgcgggttcctcgccctgggcgttttccttctcccgcctccacactcggggtgttctgctcaccgcgcgtgccctagacggccttgatgaggaagcccgccttctcctggatacctccttgatgccgcgcttgcccaccccgaagtcccgcagggtggcgatggagaagcgcctgagcggcttggtgcgctcccaggtgcggcaggtcactcctgggagaggaacgcaggggtggggagaggtcaggccgtgggaacaggcacagaagcctcgcgcaggagaactgcaaactcagtcagagaaacacagagagaaacagagaccgaacaggaacaagaggatcagaaaagagacaggccagacagacagatgcacagcagaacagagggagacgggacactccatggagcatagggagggaaggagggagagaaaaagacagagatgggagaagatgatggaagggggggaagtgaggtatggggagatctgcgaggagaaaataaaaatggtgaaagagtcttttttgtttgtatgtttgtttatttgtttttgagacggattctcgctctgtcgcccaggctgaagtgcattgtcgccatcttggccgctcgctgcaacctccaccttccaggttcaagcgtaaaaatggtgaaagactcctaagctgagctggtgaagacagaaaactacggaaagagaaacagagacggtcgggaaggaggagagactgttatcaggagaggaggctggagatgtggaagtaggaataccgcgaaatcctaagacagaggaagaagaaggagaggtcagtggacagaggagaaactcagagaagcacagaagctgagaaggacaaaaagacaaatgaagacagagaaccagggttggaaaacagaaacccaggattgtcctcagagatggggaaagaggagactccagtgagagaggcagggagaaatctggacagggacagggacagggatgctggagacaggcaagagggagaggccgcaatgaagggagctggggagcgaaggccagacagggggctctgccgcagccttcagtgggcaggagagtcagggagaaggctggggacacggaggccatcgagtcggcctggccaccttccccctcttgggcaccccctcaccatagcctttgaagagccagtcgaaggtggcctgctcgcctcgcccgctgaactcctcagcctggtccaccagagcctccttgacggcatcatgtccgcacagcaccacgacccgccggggccccaggtgaatggtgaacacggggccatagcgctcactgatctgatggaggcaggtgggagtggttagagggagcagcccccactctgaatgggcgcagcaccgagatatcatgtactgggatgttttgcccccaggttctcacagtcagggagctggacatcccaagatcctgtctttccagcctaggaccctgatgctgaaactccaaaactccctttcctaagactctggtccacactggtcaatcccctgccacaaagcctcagccaactgggcagcccccaccccgtgccacccatctccctgccttgggacaccttcatgatggagtcacatatgtgctctgtgttcagctgcaggtagtttccaataaagagcaatggggtgggtcccaaaggcagcttccccctgctcttcctctgctgccagactgacatcaagaccatcacagtcaggctggccagcaaggccaccagaagcagccctgaggccagcatggtggcagtggaatgatagatggtgacggctggggtggtttgcctttatactgcctgaaaaaaaggggtggactttggctggttataaaatcacctcatttcacctcccaactacatcctctccgtgaaccccacctagctttggacacaaccagcaaaggaggaggagggggaccccagggaagctgaacagagagggtacctcccgactaaatctgtggtacctcaggaggggtgccccagggctgtggatttaggagcgggcaacagataagctgtagaacaaaggagttgggaatatttgcataggggagcacttgggctttggatttgggatctgggagtgagaatgcaccccaaaattgtggatttgggggttccgaggagaagaatgcaaaggtctgggttttattagggtgagatggaagtgtggctgtgcatctgggggtcttctgttgtggaggatgcagggttaagggtctcaggaggggggattccaggcatatggacttgagagtcttggggctaggaagacccagggctgtgggtgtggagtttctgggaggaggagtgtgtagcaagcccagtaggtcgtcccagaaagcccagcagcccagcactgggcccaggggctgacttgattttgcttttgcccagagctgtctcttgatgcccggaatcctcactggaacctcagagtgaggccaggatgggtgccatggaaactccactgaccatctctggttggcaaaggggtggaagaccagagccatatttcaagggaaatttccacacacctggagaagagtaccttgtgttatcagttggcagagggattggccaggtctggagaaatagtaacaacaacccccaaatggtggaaaaagctcaagtgtcccaagggttgtaatttacaaagacctccactggtttccaacccagatccttagggaaacccactagattgattgtatcatccctattaatattatgattgttgtttatctttctcattttatataagggtctacagaggacagaaaacagacagtaggcaggggacatgcatgagtggccctgaactcccatctctcctgctctgagtacttagttcccctttctggatttggttttcccaccagtagaaagggagtatttaggaaaagatcatatttgagggtgagttaagtctcctttaagggcgattcctgctttgtcaggggctactactattagcaggcagagggaacaatcgcagaagagattggggtaaactccagtgttaggcacagaggtagatcctggggtgggtgtgagtggagaagggatgagtagccctcctgtccttccctcagggaaattcttccttagtaaacggggcagttaccctttggtgagcatggtcgtatatgggaagattaagtctaggtgtgtatgatctggtcgaatctttgtaacagtgaggtttgttcatcatgatcatcctcattttgaagatgagcagatctagactccataaatcctcttgagtgaggtcacacagggaataagtgagggagctgggatgtgaactttcttctcatcccccgtcattgactggcctagatcaccctgggagtcaagtgcaggccaggcttagcaggaggtgagtgctgagactggcatcagcagtggacacactgatgacattggcgggttctgatatcagcatcaggtgtgttcagggagggaaaggcatcgtgttggctttgggactgcccccaggtgtatgcgaggatgggaaacaagttggtactgaacttgataccaggagaatattgaagtcatgtttggtgccaagagggctctgtgtgttgtttcaggtttcattgagggcataagtgtgtcctgcttcaggagggcgtaagaatggcaccatatagggtctgaggttggtcccagtgggctgtgacatgagcatgaggcaggtgctgatattggtcctatgtgggtctgagatgagcctcagccagatcctgagaggggccccagatggccacaggacaggctctgatggttggtccttccagggttgcacctctcctctaggtcaccaaatttggacaagtggatgtgggtgaggttgacactcccaggactggctctaactggctcaaattggctgttgagctctgagacctgtgtggaggaatcaaagagcagagaacaaagcagagagaggaaagctgtttattgattttgtgggggaagaggtgggaaggaggattagcaccagctgggcagacatcaatccatctaatcctggtcaccagcctgcacttgggctggccacaagcctgggtccttcctcttctcccttgtttcttaaaaaggagagaggtagaaatttggagagtttgtttctcagtgagtttggcactaggaagggcactgagtgttcagacaggctgccatgacctggccagggtgggggtggggagagtcaggttgggagaactctagtatttggggacatagagttcaagcaattttggccttgttgattactctgaagtgtggagtaagagaacggtgtctgaaattaagtgggagggacttgtcccagtggcggtgcgggtacaggctttcagagtgagttagtggtgaacccaggaaaatccctttccattgctgggcctctgtttgcctttctggatggatggtacagtggttaagagcaaggttaaggcatggattggaatccaaaccttatcccgtctttgttgtgtgaccttgaacagctgacttcgtctctctgaaccttatggagccaaaaacagctcctagctcttcagctatttaggtgagaagtatatgggtcaaagcaggggaggtacatgtaagtgctcaatgaatattagctgtttttattcatctgtatgttgaagagaatggacgagatgttctctaagccccctcctggcttttacaattctctgctctaacgttatcaaaacttttcctttgagaagggggaagggagacagagttttttgggaacctctctccacatcccttccttagcatagccaagccttacccatgaagctgtgaataggaaattgaacttaggctgcctcctagagcatggcgctgagttaagcagtatccgcaggaagaaaggccagtgttaggccctcagattactctggatgggcctggagccctgcacaggactttgctcacctgtctctctcccgttttctctgatcttgtctttctgtcttcctctttctcgttccctgcaagtcaaccttacccttaactgccctgtgtgctcctgcaactttgcaactttgcatgattttgtccagtggtttctcctagatgcctctgccatgtttatccttatttatacgtctgtctgtgtgtgtgtcagtctgagtgcatgtttgaggttcctgtgtgcatgtatgtttcagcatgtccctgttgacagatgaatttatgcatgcaccaggctttgtggagtgtgtgtttgtgcttgataagtgggcatccattccaacttatgtctacacatgcacatctttgtgagtacctgatgaggtgcatgtgtgttcctgccacctttcctgaatgtttgccagtctctgtctgtctgtgcatgtagcctgagtgcatgctttgtgttatgccacttggggggtacctatgacgtgcatttctttgtccaacctgatgtatggctgcatgttcacatttgtgtggattcatgcacaactgggtgactacatataagtgtttggatgttttatgcatacattttggtgtctgtatgcaggcatgtgggccctgttgtgtacacatgaacatgtggtatttgcctgtacctctctgtgtctggattcaaaaatatccctagcccagatccatttctcttctaaaaaaaaaaaccatgtgaagctttttatgagcatgatcttaattacacgctgcactgtaagcctgtgaggttggttttatcatcttcattttgcaaatgagttggataaggctcccaaaattggaagtcccttgctttgggttctacaatgaatgagggtagagctggagtacggccttgtgtgactgtcaagtccatgctgtcaaccaccaccctggactgccaagccccacctgttttctttatgaaacatcagaaaattgcccctaatctcctgtggttcttgaaaaacttccctgtaagcacataacaaaagattccaaaatgtcagggggaaaaaaagtcttttaataggagggagacttcaacttctagtttttgcattctttggaagattaaccaaagatacggtcagctggtatacccctcaggccattggcagtgagacagtgcaggagttgggaaactagatgttgtgggcggagagtgaaatgtctgtgtttcatatttcagagtgatgacaaggataaaggtgggcctgtggaagtattggctgaaatagagtgaagaaggtcaaagaagagaggaaagtcaagattctttcttcctgagtgtttggatagctcacattcctggccataaagggcttccctaccagtagaatgtcagggcttagagtagagaggtaggaaagaagttgggtagatgacagggatgaacaactttttaaatcacagggcgaaggtgtcagtatccaagtgtctggagagtttcttctggtaatgtttgagtagcttctattggatcaagcatcctgtgaataacagctattaactctgaagaaaacatttttaagaacccagttctctgaaattactggagagtgaacgaaagcagcagatactgaagggggttggatgaagcaggtttcctattttgggtgttttttttaatgctttcggcctaaaggcagaccctggaaagtgccttgtggggtggcttaatcccagatagagatgttttaatttttttgacttcaagaaccagaggacagaattcaaggtgattatagcatctactgatagtggtggtagaattgcaaaaaggaaagagccagagagggggagccccaaattctgtaaataaactctgtccaaatttctgaccaattgttgaactacttatttgctggagaactccaggtaccctgctaaggctaaaggaacttaattgagatttcagagctgagggtttgagattagccaggttaactgctttccaaattaaacaaacaaccaaaatcagtatttttcaacagaacataatggaatccatggtctctccaacttatcacttgtaatatccaggatgaaatctcaaattactaggtatatgaagatacaagaaatgggggagagtctagccaagatggccaattaggaaaagctccagtctacagctcccagtgtgagtgacgcagaagacgaatgatttctgcatttccaactgaggtaccaggttcatctcatggggcattgtcagacagtgggtgcaggacagtgggtgcagtgcacagagcgtgagccaaagcagggcaaggcatcgcctcacccaggaagtgcaaggggtcagggaattccctttcctagccaaagaaaatgggtgacagatggcacctggaaaatcgggtcacttccaccctaatactgcacttttctaacggtcttagcaaatggcacaccaggggatcagatcccgtgactggctcagagggtcctatgcccacagagccttgctgattgctagcacagcagtctaagaccaaactgcaagacagcagtgaggctgggggaggggcgcctgccattgctgaggcttgagtaggtaaacaaagtggccaggaagctcgaactgggtggagcccaccgcagctcaaggaggcctgcctgcctctgtagactccaccctctaggggcagggcatagccaaacaaaaggcagcagaaaactctgcagacttaaatgtccctgtctgacagctttggagagagtagtggttctcccagcacgcagctggagatctgagaacagacagactgcctcctcaagtgggtccctgacccctgagtagcctaactggaaggcatcccccagtaaggggcagattgacacctcacacagccgggtactcctctgagataaaacttccagaagaatgatcaggcagcaacatttgctgttcaccaatattcactgttctgcagcctccgctgctgatacccaggcaaacagggtgtggagtggacctccagcaaactccaacagacctgcaactgagggtcctgactgttagaaggaaaactaacaaacagaaaggacatccacaccaaaaccccatctgtacatcaccatcatcaaagaccaaaggtagataaaactgcaaagatggggaaaaaacagagcagaaaaacttaaaattctaaaaataagaacgcctctcctcctccaaaggaatgcagctcctcaccagcaatggaacaaagctggatggagaatgactttgttgagttgagagaagaaggcttcagacaatcaaacttctccgagctaaaagaggaagtttgaacccaaggcaaagaagttaaaaaccttgaaaaaagattagacaaatagctaactagagtaaccaatgcagagaagtccttaaaggacctgatggagatgaaaaccacagcaagagatctatgtgacaaatgcacaagtctcagtagtcgatttgatcaactggaagaaaaggtatcagtgatggaagatcaaatgaatgaaataaagggagaagagaagattagagaaaaagaataaaaagaaatgaacaaagcctccaagaaataagggactatgtgaaaagaccaaatctatgtctgattggtgtacttgaaactgacagggagaatggaaccaagttggaaaacactctgcaggatattatccaggagaacttccccaatctagcaaggcaggccaacattcaaattcaggaaatacagagaatgccacaaagatactccttgagaagagcaactccaagacacataattgtcagattcaccaaagttgaaatgaaggaaaaaatgttaagggcagcaagagagaaaggttgggttacccacaaagggaagcccatcagagtaacagctgatctctcagcagaaactctacaagccagaagagagtggggccaatattcaacattgttaaagaaaagaattttcaacccagaatttcatatccagccaaactaagcatcaggagtgaaggagaaataaaatactttacagacaagcaaaagctgagagattttgtcaccaccaggcctgccttacaagagctcctgaaggaagcactaaacatggaaaggaacaaccagtaccagccaccgcaaaaccatgccaaattgtaaagaccatcgatgctaggaagaaactgcatcaagtaacaggcaaaataaccagctaacatcataatgacaggatcaaattcacacataacactattaacatgaaatgtaaatgggctaaatgctccaattaaaagacacagactggcaaattggagagtcaagagccatcagtgtgctatattcagggacccatctcatgtggagacaaacataggctcaaaataaagggatggaggaagatctaccaagcaaatggaggttgcaagcaaatgcaggggttgcaatcttagtctctgagaaaacagactttaaaccaacaaagatcataagagacaaagaaggccattacataatggtaaagggatcaattcaacaagaagagctaacgatcctaaatatatatgcaaccaatataggagcatccagattcataaagcaagtccttagagacctacaaagagacttagattcccacacaataataatgggagactttaacaccccactgtcaatattagacagaacaatgagacagaaggtcaagaaggatatccaggacctgaactctgctctgcaccaagcagacctaatagacatctacagaattctccaccccaaatcaacagaatatacattcttctcagcaccacatcacacttattctaaaattgaccacataattggaagtaaagcactcctcagcaaatgtaaaagaacagaaatcacaacaaactgtctctcagtcaacagtgcaatcaaattagaactcaggagtaagaaactcactcaaaaccacacaactacatggaaactgaacaacctgctcctgaatgactactgggcaaataacgaaatgaaggcagaaataaagatgttctttgaaaccaacgagaagaaagacacaatataccagaatctctgggacacatttacagcagtgaaggggtggcctgcccctccacacctgtgggtatttctagtcgggttgggacgagagactaagaaaagaaataagacacagagacaaagtatagagaaacaacagtgggcccaggggactggtgctcagcataccaaggacctgcaccggcactggtctctgagttccctcagtttttattgattattatcttcattatttcagcaaaaaggaatgtagtaggagggcagggtgataataaggagaaggtcagcaacaaacatgtgagcaatagaatctatgtcataattaagttcaagggaaggtactatgactggacatgcgtgtaagacagatttatgtttctctccacccaaacatttcagtggagtaaagaatgacaaggcagcattgctgcaaacatgtctcgcctcccaccatagggcggtttttctctcatctcagaattgaacaaatgtacaatcgggttttataccaagacattcagttcccaggggcaggcaggagacagtggccttcctctatctcagctgcaagaggctttcctcttactaatccacctcagcacagaccctttacgggtgtcaggctgggagacggtcaggtctttctcatcccatgaggccatatttcagactatcacatggagagaaaccttggacaatacccagctttcaagggcagaggtccctgtggctttctgcagtgcattgtgcccctggtttattgagactagagaatggtgatgacttttaccaagtatactgcttgtaaacattttgttaacaaggcacgtcctgcacagccctagatcccttaaaccttgatttcatacaacacatgtttttgtgagctccaggttgagtcaaagtggctggggcaaagtggctggggcaaagctacaaattactaacatctcagcaaagcaattgtttaaagtacaggtctttttcaaaatggagtctcttatgtctttcttttctacatagacacagtaacagtctgatctctctttcttttccctacacagcagtgtgtagagggaaattcatagcactcaatgcccacaagagaaagcaggaaagatctaaaatcaatatcctaacatcacaattaaaagaactagataagcaagagcaaacagattcaaaagctagcagaaggcaagaagtaactaagatcagagcagaactgaaggaaatagagaccaaaaaaaaaaaacatcaaaaaatcaatgaatccaggaggtggttttttgaaaagatcaacaaaatagatagactgctagcaaaactaataagaataaaaactggaagaagaaaagctgaagaatcaaatagatgcaataaaaaatggtaaaggggatatcactaccaatcccacagaaatacaatctaccatcagagaatacacctctatgcaaataaactagaaaatctagaaaaaatggataaattcttggactcatacaccctccaaagactaaaccaggaagaagttgaatctctgaatagacaaataacaggctctgaaattgaggcaataattaatagcctaccaaccaaaaaaagtccaggaccagatggattcacagccgaattctaccagaggtatgaaaaggagctagtatcatttcttctgaaattattccaatcaataaaaaaagaaagaatcctccccaactcattttatgaggccagcatcatcctgatacctaagcctggcagagacacacacaaaaagaaaattttagatcaatatccctcatgaacatcgatgcaaaaatcctcaataaaatactggcaaactgaatgcggcagcacatcaaaaagcttacccaccaagatcaatttggcttcatccctgggatgcaaggctggttcaacataggcaaatcaataaacgtaatccatcacataaacagaaccaaagacaaaaaccacatgattatctcaatagatgcagaaaaggcctttgacaaaattcaacagcccttcatgctaaaaactctcaataaattaggtattgatggaacgtatctcaaaataataacagctatttatgacaaacccacagccaatatcatactgaatgggcaaaaactggaagcattccctttgaaaactggcacaagacaaggattccctctctcaccactcctattcaacatagtgttggaagttctggccagggcaatcaggcaagagaaagaaataaagtgtattcaattaggaaaagatgaaatcaaattgtccctctttgcagatgatatgattgcatatttagaaaaccccaacatctcagcccaaaatctccttaagctgataagcaacttcagcaaagtttcagcatacaaaatcaatgtgcaaaaatcacaagcattcctgtacaccaataacagacaaacagggagccaaatcatgagtgagctcccattcataattgctacaaagagaataaaatacctaagaaggagaaataagaacacttttaaactgttggtgggagtgtaaactagttcaaccattgtggaagacagtgtggcaattcctcaaggatctagagctagaaataccacttgactcagcaatcccattactgggtatatacccaaaggattatatatcatgctactataaagacacaagcacacttatgtttattgcagcactattgacaatagcaaagacttagaaccaacccaaatgtccatcaatgatagactagattaagaaaatgtggcatgtatacaccatggaatactatgcagccataataaaaaaggatgagttcctgttctttgcagggacacagataaagccagaaaccatcattctcagcaaactatcccaaagacagaaaaccaaacacctcatattctccctcataggtgggaattgaacaatgagaacacttggacacagggcagggaacatcacacaccagggcctgtcaggggatgggggcctaggggagggatagcgtcaggagaaataccttatgtaaaggatgagtcgatgggtgcagcaaaccaacatggcacatgtatacatatgtaacaaacctgcacattgtgcacatgtaccctagaacttaaagtataatttaaaaaaaattagccaggcatggtggctcatgcctgtagtcccagctacttgggaggctgaggcaggggaaatcactcggacctgggaggaggaggaggaggttgtagtgagctgagatcatgccaccgcactccagcctgggtgacagagtgagactctgtctcaaaaaaaaaaaaaaaaaaaaaaaaaaaaaaaaaaaaaaaaaagaaagaaagaaagaaagaaagaaagaaaagaaaagaaaatatttaagatggcaaatttcatggtatgtgtttgttaccacaatcaaagaaaaggttaaaaagaagtaaaggaataaaaggaatgatggcaatattatagcaaatagggaatatatttaaaaagatagaaataattaaaaacaactaaatgggaatgtggagttgaaaagtacagctgaaatgagaaattttccagagggaatttatctagagagaattctcaatagtaggtttaaactggcaaaagaaagaatctgtgaacttgaaaatagattaagattatgcaacttgaagcatagagaaaaattaagaatgaagaaaaatatacagggcctcagagaaatgtgggacactgttaagtgcaccaatctacacataatgggcataccagaagaagagagagaaaaaggggccagaaaaaatattcagagaaataatggcaatagcctacacattcattaagcacaataattccaagtgggataaatgcagacatccacaaatggacacctcataataaaaaatattggaattcaaaaagaagcaggagatcttgaaagcagaaaagaaatatgactcatcagtttcaagtggaccccattaatataacagcctatttctcagcagaaacaatggaagccagaaggcagtgggatgacatattcaaggtactcaaagaaaaaaaagtgttaaccaagaatttttaaccagaaaagctatctttccaataagaagatgaaatactttccaagataaaaagtgagagaattcattgctaacagacccgccttactagaaaaactaaaggaaattcctcaggctgaaagcaagtgactccagattgtaatttgaatccatgtgaaaaaacaaacagcaccagaaaggcaattatgtaacggtagaagacactataaatgtatatttattttgcttccaactgattttaaaacaactgtataaaatatgtgtatctaatacattgttgggcctataacatacgacaaaacatgacacagacagtcctcaacttacaattgttcgacttacaatttttcaactttatgttggtgtgaaagtgatatatactcagtggaaattatacactgaattttaaattttgatatttttgtgtgctagcaatgtatgctatgatactctcttgtgatgctgggaggtggcaatgagcggctcccacttagtcatgcaatcacaaaggtgaacaattgatactatataatatactatatttaatacattacttgagctattcaacaccttattgtaaaataggctttgtgttagatgattttgcccaactgtaggctaatgtaagtgttctgagcatggctaaggtaggctagactaaactatgatgtttggtaggttaggcatattaaatgcatttttcacttgatatttttaaattacagtgggtttatcaggatgtaactccatcataagtcaaggaacatctgtatatgtgtaatatatttgccaatagccacacaaaggaggtaggtgacagcaaagctgtattaagctaaggaaatgactacagataatgagctaataactatagcaatatattgttctgtttgtgatattaatagttgtaatatgtatacaataatgctactaaaggggggaaaataaatagagctgtgtagcagtaatatttttctatatcattggagttgagctagtataaatctggatctgattctgataagttaagatgatctaggtaaaacctagatcaaacatactttatattatgttcagaagaaactcaaaatatagtacaagaatcatttaaaaaattaaaactctacactaggaaatattcatttaattcaaaagaaagcagtaaaggaggactagaggaagaaaaaaagacaaggcacatatagaaagcaaaagtaaagtggcagatgtaaatgtaaccatagaaataacgttaactatgaatgaattcaacaatcaaatctaacggcacagtttttctgactaggtttgaaaaatgtgattcagctatatgctgtccaccataaacatactttagattcaagggtacaaatagaataaaagtttaaaaatggaaaagatatatatagtgcaaatagtaaccacaagagagctggaatacctatactcataccaaacaaaatagaaattaaaacaaaaatatcaatagagaaaaaagacattttattatgataaaagggtcaatgtttaaaaaaattgaacaaactaggaatagaagagtatttcctcaacctgataaaggtcttctttgaaaaacccatagatgaaacccataggtgaaagggccaattcttccccactaagatcaggaacaagacaagaatgtccactctcattacttctacttaacatttgtactggtggttctagccaggacaataagacaagaaacaggaattaaaatcatgcagattgggaaggaaaaagtaaaactctctctagtcaaagatgacatgattttgaatatagaaaattctaaggaacccacaaaaaacctgtcataactaataaaaacaagttcagcaaggttgcaagatatgagatcaatatacaaaatcaatggaatcttttacactgaaaaatgaaattaagaaagcatccattcataatcacatgataaaggaataaatttaactaaaggaagtacaaaaacaatcaggaaagaaacaggagtagcaagaaacagctatagattgcatggttctttcctgacaaaatcagtatgttgaaatccagtccccagtgtgatagtatttggaagtggagcatttgggagatgattaggtgacaagtacagagccctcatgaatgggattcgtgtccttacaaagaagccccagagagctcccttgttcattttaccatgtgaggacacagcacaaagattatgaaccaggaaacaggccctcaccagacacaaagcatgccagtgacttgatcttgtttgtttgtttgtttgtttgtttgttttttgagatggagtcttactccattgcccaggctggagtgtagtggcatgatcctggctcactgcaacctccacctcccaggttcaagcgattctcttgcctcagcctcctgagtagctgggactacaggcacctaccactacgcctggctaatttttgtattttagtagagatggggtttcaccatgttggccaggctggtctcaaacacctgacctcaagccatccacccaccttggcctcccaaagtgttgggattacaggcgtgagctattgtgcctggactatgacttgatcttggacttcccagcctctagaactgtaagaaataaacttcttttctttattaaaaaaaaaaaaggacaaaaaaaagtttaaaaaatggggcttgtctccaagtgaaataaataaatggccagtgagcacatgaaaaatcctagacattattagccatgagggaagatgcaaatcaaaaccacagtgaggtaccccttcaaatatatgagggtcactggaataaaaaagtagtaaaacaataataccaagtgttgacaaggatagcaagagaatggtgccctcataaactgctgatgggcatgcaactgttgcagctgctgtggaaaacagtctggcagtccctggaatggttaaacgaagagcagatgacaccgcagttccattcctagatatgaagctaagtgaaatgaaaatatatgttcacaaatgagaacacatggacacagggaggggaacatcacacaccggggcctgtcgggggggtgggaggcaaggagagggagagcattaggacaaatacctaatgcatgcggggcttaaaacctaaataacgggttgatagttgcagcaaaccaccatgacacatgtatacctatgtaacacatctgcacattctgcacatgtatcccagaacttaaagtaaaataaaataaaacaagaaaatatatgttcacaaaaatttctacatgagtgtttatagctgcattattcacaatggtcaaaaggtggaaagaacacaattgcctattgtcatcggtggaattgtgtcccctaaaaatacatgttgatgtactaacctccagtttctcagaatgtgaccttatttgtaaatagggccatcacatataatcaggttaacatgaggtcattggggtgggtcttattccagtctggctggtgtccttattgacaccagagggaacgagggagacacacagggagaagaaggccatatgttgactgtggcagggactggagcaatgcatccaaaaccaagaaatccaaaccaagaaattctaagaattatcagcaaatactaaaactggaagagtcaaggaagattgatctcctacaggtttcagaaagagcatggctctgctaacaccttgattttgaacttctagcctccagaactatgagacaatatatttctgttgtttttgcttttgttttatgggtttttctttttgtttttgagacagagtctcactctgtcacccaggctggagtgcattggcacaatctcagctcactgcaacctccacctcttgggttcaagtgattctcctgcctcagcctcctgagtagctgggattacaggcacgcaccaccatgccgggctaatttttgtatttctttagcagatacggggtttcactatgttggccaagctggtctcaaactcctaaactcaaaagacccacccacctctgcctcccaaagtgctgggattacaggcgtgagccatcgtgcccagcccatttctgttttttaagccactaagtttgtggtactttgttatatgtacctaggttcccaggcagccctaggaagctaataaactcatccctggataaactgataaatatccatacaacgcaatttcgttcagccacaaaggggaatgaagtagaacttcatgctatgactagcatgaacccttacaaaagtgttagtgaaagaagccaatcagaaaagatcatataatatatgactcaatttacatacaagtcaagaatagagaatctaggccaggcacagtggctcacgcctgtaatctcagcactttgagaggccgaggcgggaggatcatttgaggtcaggagttcaaaacctgcctggccaacatggcaaaatcctatctctactaaaaatacaagaattagccaggcacggtggtgagtgcctgtaatcccagctactcaggaggctgaggcaggagaatctcttgaacccaggaggcggaggttgcagtgaacagagatcatgccattgtactccagcctgggcaacagagcaaggctccatctaaaaaaaaaaaagagagagaaagaaaagaaaagaaaaaaagaatagaggatctataaagaaaagtagattcgtggttactcagggcggggaattgagtgtggggggaaagcagtaagacaaaggtatgaggtttctttttgaggtgatgaaaatgttctaaaattgaccatggtggtggttgcagtattgattaatacacccaaacccatttaattgtacactttatgatctgtaagttatatcaataaaggcgtttttaacaagaaaagaaacagataaaaagaaaaaaagctcacagtaaagaaaatgtcctctctgacttataggtcttgattagttctaggaagaaaattgattcacctagtttctgagaaatgtttactctaattaaatgaattacttccagggaatagcaggagtaccgattctctctaacctgcctcatacttcctggtgttacctaatccacctgggcttcctccatcacagtcctccacattctactctgtgctcccttcatcagagctatgctgggctatgctgggctgtcactgtgagagatggagcactcttccctgctgggctgtgagccctatgtggtgagtcactgagcttttcctggtcaccattatgtcattaggtccttctgtgggccccttgaaagaacctgatgtgtgttgaataattacaatgtaatgtcttatcttatatcctcagaatttctaggaactttttttttttttgagatagaatctcactctgtagccaggctggagtgcaatggctcagtctcggctcactgccacctccgcctcctgggttcaagtgattctcctgcctcagcttcccaagtagctgggactacaggcacgtgccaccacacctagtgaattttagtatttttagaagagacaggctatcaccatgtaggccaggatggtctcaatctcttgacctcacgatccgccctccttagcctcccagagtgctgggaatacaggcgtgagccaccgcaccagcctctaggaactttctaataggctcgcgtcataaatagaaatgaaggctattttgaggacctatagctcttctgtgctttacctaaagagagatcaacaattctctctcctgcttaatgtattcttttttttttcccttgagacacaatcttgctctgtcaccagactggagcgcagtggcgtgatctcagctcactgcagcctctgcctcacgggttcaagcgattctgctgcctcagcctcccgagtagctgggactacaggcacatgccaccatgcccggctaatttttttttttttttggtagagatggagtttcatcatgttagccaggctggtcatgaactcctgaccacaggtgatccacgcgccttgccctcccaaagccctgggattacaggcgtgagccaccgtgcccagcctgctttatgtattctatttgcacgtaagatcatttgaaaaaaggttttcacagctaaaaatgtttgatgcccattgtactgtgtacttgtgaggtgtgtttgtagctctgagatgctgtatttatagaaggggtgccaaggctttaatgatgtgggtttgtatgttggtgtctgtggtgggcataggaatgtgctacttgaatcttcattcatggagaactttccaatcagcttcaataagggcagtgagctgagagtctccagttgcagcaccattaggacccacctcagcatggagcggaacccatgcttttccaaggaagccccagatagtaattaaggactcttggatccagggcataaccctatctgcccaacataagccatccccaacagcatttttctgtggattatgggtctgttatctctgcctggtggtcttggcctgtccctgtccaatcctccttccttcctttctttcacaagtattggatctgcatcctggtctgaagactttttctgctactagtgtcatctgcttccttttttgtctttcacatgcattaccctcctccctccaataaaatgatgaacccctaactccatctaagtcttagcttcccagaagatgtaattcccaaaatgtacataatggtgcttattgtttgtttgttttgagacagagtctcccactgttgcccaggctggagtgcagtggcactatctcggctcactgcaacctccccctcccgagttcaagtgattctcatgcctcagcctcctgagtagctgggattacggggatgcaccatcacgcctggctaatttctatttttagtagagatggggtttcactgtgttggccaggctggtcttgaactcctggcctcaagtgatctgcccaccttggcctcccaaagtcctgggattacaggtgtgagccaccatgtctggccgcatttattgtttattatatacacagtctcaaaactcttttctgattttctaagtacctcctattgtgtggctcttgatcagggacaaggctttgcctcccactacaacagctgaaggaggtattcattcttcctcacctcaccttgaaccctaaggttttaacatgtggctagatatctggaactcttaatcatgaggatgtgagacaaaaacacagacacaatcaggaaatcatctatagtggcatcaatgggtctagagtcccatggcagtacccagggggtgggtcaggtgttcagtacccaggagatgggtggtgtggcagcaggtcctaccgaatagctttgaacattaccttggctggtggtcccctaccacagcctcttttttctactcatattcttacgctgtttttccagaattgctgttaattttgtgagctaaacaatcaccttccagtagctaacagcctttctatttaaaataaccaaagtcactttatattgcttaaaaataggaaccctggctgggcgcagtggctcacgcctgtaatcccagcactttgggaggccgaggcaagtggaccacctgaggtcaggagttcgagaccagcctggccaacatggtgaaatctcatttctactgaaaatgcaaaaattagctaggcgtggttgtgcacgcctgtaccccagctacttcagggggctgaagcaggagaatcgcttgaacctgggaggcagaggttgcagtgagctgactgttatgggtcccgaggttccctggaggtgacaggttgaagaagtgatcaaagatgaggtgtgcactcctgcctgaactcccactttctctcacaccctatatacaataccgtagcaaaccccaccatctcaggcagtgaaatagttttcaaatctaccacctcctccccagcttcactgctgctgctgggtctgagtcaacatcaccagttgtagtagcctgctaataggtctttgctttcatatccatcatatgatagctagtgtgagcccattaaaatatgtcagtacatatcaccctctgctcaccatccctccaaagaccttgatcactctcagggtaaaagccaaaacctcaccttggcccacaagaccccacacagtctggcccccatcgcctccctggcctcgtttccttcactcctactctgcctccctcctccatgccagctacacctgctccctgtggattcctggatgcacacagcctcctgccttaggactctgctggtttgtttgtttgtttgtttgcttgcttgcttgtttgtttgtttgtgacagagtctcgcactgttgcctgggctggagtgcaatggcgtgatcacagctcactgaaacctctgcctcccaagttcaagtgattctcctgcctcagcctccccagtagctgggattacaggcacctgccaccagtcccggctaacttttgtatttttcttagagacaggggtttcaccatgttggccaggctggtctcaaactcctgacctcaggtgatccgccagccttggcctcccaaagtgtgaggattacaggtgtaagccaccatgctcagtcgctgctggttttttgttgttgttgttgttgtttgttttttgtgtttttgtttttttgttttgagacagcatctcactctgttgcccaggatggagtgcagtggcaggatctcggctcactgaaagctctgcctccctagttcacaccgttctcctgcctcagcctcccaagtagttgggactacagccgcctgccaccacagccagctaattttttgtatttttagtagagacgaggtttcactgtgttagccaggatggtcttgatctcctgacctcgtgatccgcccacctcccaaagtgctgggattacaggcgtgaaccaccgcaccgcgcctggccactgctgttggttaatcattctgtcaggaacactcccttcccagatatcttcatagcttgctgctccaccaccttgtgaaaacacccctaaccatccatttaaattccaatcacagaatgcatatcccacttaccagccttgcttttctaatgcagtatgtcatttgcatatttgtttcatgtatgctttattgtccaccttccttactagaatgttagctccctgatggcggagtttttgtctgttttgcttactgatggatcccaagtccctgaagactacgctggcacttgttgggtattcagtaaatattgcctgaataaatgaaaaagagggaacgtttctgtcagttaatggagtttggaaacggaatgatagaaggtgggaacaactgagctatcctcaaaaatggagtggagagagcaagcatggtggctcacacctgtaatcccagcactttgggaggctaaggtgggcagatcgcttgaggccaggatttcgagaccagcctgggcaaatggtgaaaacccatctctactaaaattacaaaaattagccaggtgcagtggcacgtgcctgtaatctcagctactcgggaggccgaggcacaaaaatcacttgaacccgggaggtggaggttgcagtgagcctagatggtgccactgcactccagcctgggccacagagtgagactccatctccaaacaaacaaacggactggggagtatttggaattgggagttgtgctgagagcaactggaaaggaagattagaagaagagatgatggcggagaaaggtaaggagcaagatgggtgaggatggggcattttacccaggggaagtcactggagagcagctggcagaaactataactaataacaagtcaagaaagacatttcaaactgttggctgtgccctacatcgctgtcacacacaatacacaataaacttgctatgctcaacagacttgaggtctttgttcacttttcgggggctggtggaaatgagaaccaaagagaaaggattttagactacattttggtcaaaatcagagcacacacaaaaagggacaatatgaagacacagggactgcagtaataatttgatgcagccagaaacctaagcaacggtgaccatgtgaccatgaaacctgcaggcagaggtgcaaatcttgcacagggcgttgctcttctacggcaggggaagacacgcagctgtaccttctcaggtgaccctggctgactctgtaatcatagtgcctcctcttagggatgcttgaggattagtaagatgaggaagagggggtgctcctgaacacgagaggagagctgcgttcttcaccgcttcctccttgccccgcaggaggtgtagctcagcgggccacaagacagagctcgtaggtcggggggatgttgccaaagcctgagagcttgggggtgatatcgatgtccacaggcggcaccagcgagtgtagagagaagttctgaagggtggaggtgaagtagagaaagagttccatgcggtccatggcctcgcccaggcagatgcgctttcctggaggcacaggggagggcagaaggaagggtcgcacctgcacaggtcatggggatgtcggggtgtctggactgaccaccccactgagcctcagctgcctcatcggcacctcagggctcatgactgtgactgctttataaaggggtgttacacaggcttagtgggtacctatagttagtgctcagctaggacctgctacttctctgatggctgggattccatctcgttccaagagggaatggttctataggatccatgagtttcaaggttgtgttcatttcagttcctcaagggtttgtcaaatgcctattaggtgccagacactggtgacaaaaaaagtgaaaactcacccttaataacacttactgtttgtaagccactcttccaattgtttggaggcattaatccctgtttcacagatgggagctgaagtgactcacccaaggctccaccatttctaaatggtggagtggagtccagattcccaaccactgtcctgactccaggttccaaatgacatacactttttgttgttgttgttttttgtttgtttgagacaggatcttactctgtcgcccaggctggagtgcagtggcatgatctcggctcactgcaacctccgcctcccgggttcaagtgatttttgtgcctcagcctcccgagtagctgggattacaggcacccgccaccacgcctggctaatttttgaattttagtagagacagggtttcaccatgttggccaggctggtctcgaactcctggcctcaagtgatccgcctgcctcggcttcccaaagtgctgggattacaggcatgagccactgtgccatgccaacatacacttaaaatgttgctgcataaagattttatgacatgagtaggcaaatgactgtctgttgggcaaatttgccctgctgcttgtgttcatacagcctgcaaactatgaatgcttttggcattttaaaatggttggggaaaaaagactcttttgtgttatatgaagataaaacaaaattcaaatttcagtgtccgtaaacagtttttcaggctcacatgcacactcattcatttatatattgtctatggctgctttcatagatcaatggcaaaggttcagagactatctggctggaaaaatagaaaatatgtcttattttgttcttaacagccagttggtttatgccctgtttagtgctattactgagccaacttttttttctaattatcagagtcaatcgttctaatatttactaattctgggattctaaaatgttgtgtggttctatgatataaccttcaaattcacattgtgacttgaacttcaaatacagaccagtggctggggggtggatttagcacatgcctggaggaagtcagaccagagaaacctaccagaggaaaaaggcacaaaggcttcattcttcttgaagcggccctgctcatccagaaagtgctggggatagaaggcatctgggtagcggaagtatttggggtctttgaggacagagccaagcaggggaaatacatctgtgccctggggtgaaaatgggggcagttaggagaaatcagtgttgggctacagaggtagggaaccagggagagagaggagtgcagtggaagggaggcaatgagggtgcaaccccaccttgggcagaaggtagcctcgaaactgagtgtcccggatgaggttgtgggggacacccatgggcacgatgtctaccagtctctgtatttcgtggatgacggcatctgtgtagggcatcttgacccggtcatccacccttgggagccggtgtggtccaatcacttggttaatctcttcatggatcttagctggaaggggccagaaaatatagctgagaacagagaaaaaataaacaaaagcaggaggtgtttttgctagggaagccaggacaaatcctgcattcctagctccagcagaaagagatctcaagtgaaagccatgcatgtttgctcccttcttttttttttttttttaaacagcctgtcacccaggctggagtgcaatggcatgatctcggctcactgcaacctccacctcccgggttcaagtgatttttctgcctcagcctccagagcaactgggattacaggcacctgccacccacctggttaatttttgtacttttaatagagatggggtttcaccatgctggtcaagctgatctcgaactcctgacctcgtgatccacccaccttggcctcccaaagtgctgagattataggtgtgagccaccgcacctggcctgtttggtcgcttctttaacttaacaactgacacactggtgatgctcaattactcatcagacatcgggagacaggcagcttggagtcttgaacgctgccaggacatttggtctttacttaaaagcaccaaaaagccatggtcccagcttggctctcatacatgggttttttacaaaatgggaaagaggcatgctaggtgactaggacagggttgacacaaatgacaagcggttatgtgactgattaagatcaccactggtagagttactcctcttcgcattttagggtttagggatgagtgacttcaccttctattttcttttggagatggagtcttctcactctgttgtccaggctagagtgcagtggcaggatctcagctcactgcaagctccacctcccgggttcacaccattctcctgcctcagcctcccgagtagctgggactacaggtgcctgccactgcgcccagctaatttttaaaatatttttaatagagacagggtttcaccgtgttagccaggacggtcttgatctcctgacctcgtgatccgcctgcctcggcctcctaaagtgctggaattacaggcgtgagccaccgcacctggcctgtgtgacttcacctctgaacttgtgtttcatcatcttcaaaatgagtgtgatagttggacaaggtcatagagttgtaaacattacataaagtctggtgtacaaggaactaggacagtgcttggcacacagaagcatccaataaatattgatttgatattttttctttctttttttttttttttagacggagtcttgctctgtccccaggctggagtgcagtggtgcaatcttggctcactgcaacttctgcctcctgggatcaaatgattctcatgcctcagccccccaggtagctgggattacaggtgtgcactaccacacctggctactttttgcatttttaatagagaaaaggtttcaccatgttggccaggctggtcttgaagtcctggcctcagcaatttgcccatctctgcctcccaaagtgctgggattacaggcgtgagccaccgcacccagcctgattatttagaccagtgaaagacaactcagacaatggaggtgacactagaaacatttgagtggatgtgtgttagcatctctcatctgcaccaggagaaattctttggcttgttttgaattgcattattaaggagaggggccaaaattgggaattttccttaagcaagtagtgagttcctcattactgaagttacccaaatggaccagatcataatttattggagacagattctatttaactttggcagggcggttggctcaataatggccatcaaagataaccacctccaagtctctaaaacctaatgcctggaaggctatatatataagggtaacaaaaacacaagagagactttgaaaatgccagtaaattaagaatcttgagatgaaaagattagcctgggttgttgagattcgccctcaatataatatcgtgtgtctgtataagagagaagtgggagaatcagagttagaaaaaaaaatgtgaggctgggcacagcggctcacacctgtaatcccagcattttggaggccaaggcaggtgagttacctgaggtcaggagtttgagaccagcctggccaagatggtgaaaccctgtctctactaaaactacaaaattagttgggcatggggtggcacacacctgtaatcccagctatttgggaggctaaggcaggagaatcgcttgaacccaggaggcagaggttgcatgagctgagatcacgccactgcaccgcagcctgggcaacagaggaagactctgtctccaaaaacaaagaaaaagaataaaagatgtgatggatgccagaagtaaacagaggtttgaagcagctatgctgctggctttgaagatggaggacagagtcgtgaacccaggattacaaggagtacagctttaacacccggaaaaggcagagaatcagatagtccgttggtgtcagctagtgaaagcctatttgaacttctgaaattcagaacagaaggataatacatttgtgttgttttagacgactaagttcctggtaatttgttacagcagccacaggccgcagacaccaagtagaagattaagttaaatcaccccgcaaagttggggatttcatgtttcaagtcctgaagttctaaagggtgaagagcctgaggccgtgggattctaaattttcaagatgatgtcttctttatgttgggagggggaggtaccagataggcagctcagggtggactcaccttccacttcaggatgcttcattaacagcaagaatccatagcgcagtgtagagctcaccgtctccgtgccagcaaagaagaggttcagagtggtgaggaccaagttcttgaggttgaattctgtacgaggattatttttatcctgaaagtgaggggattgtgaatggaatcactctcttctgtctttattgtctttttttttttttttgacagagtctcgctctgttgcccagactgaagtgcagtggcatgatcccatctcactgcaacctccacctcctgggttcaagtgattctcctgcctcagcctcccgagtagctggagttacaggcacccgccaccatgcccagctaattttgtgtgtgtgtgtgtgtacttttagtagagatggggtttcaccatgctggccaggctggtctcaaacttctgatctcagttgataggcccaccttggcctcccaaagtgctgggattacaggcgtgagccactgcgcctggcctattgtgttattttctcattggctttattgtctattgtatagggagacaacaggtgggtaaaccaagcgtgtctgggagaggacacagtcagaacaaaggtcctgcggcaggaacgtgcctgatgtgttagaggaacagcaaggcagaagctgggatgaatgagatgaagtgaacaatagggaggatgggaggagaagaatgtaggatgccttgtaatatttgaacatgtagggatagtagtgtatagaatttaaatttccaaaggcaaagattcaatactataaaaatataaatttacaaatgtataaaactctaagaaatgatgatacagaagtattaaccttctaaatttctatagaaatgtagaaatagatatatatatatctatagagatatagaaatagagatatatctctatacagacatagaattagagatatatctctatacagatatagaattagagatatatctgtatacaaattcagaagattaatacttctgtatcatcatttcttagagttttatacatttgtaaatttatatttttatgttattgaacctttaatttaaatttaaactctatgccctactgtccctacacgttcacatcttttaactttaacttaaatgtttaacttaaatgttaacttaaattttaaacttcagaaaagttctacatttctgaaattctaagactcaaaactacagttgtaactctctggaatgtataagctgtaagattttaagtttccaagttcctaaattttccaaattcctaaaatttctagattcaaaatctgttttaaagctgtaacagtttatacttttacagtttctatattcatctatagataaaagtaaatgctgtgaaataatgcttgttttgttttgttttgtcctcaatgcttgcagattggttgaaagttgcagcgactagaggttgagaagtgagagggaaggaccaggggaagaagaggaggtacctggtgcatcttgatgagaaagcagtcaatgaagtcccgagggttttgggggtcaaaggatgcttcgttgatcttgaccctggaggcaatgaagtccttgagctcttctaccaagtagtagatgagattgtgtcttcctggcaaatactgcatgattccagagtacatgtcatatagctgtgggaataggcaaggggtctttgtcagtgatgggctccaggggccagcatgggctgagtctggagttggacagctggactcaaagtgcagtgctgggtctaagaatcaggtgaggcccttttgcttcccagaagttgggtcctattgagacagtagttcccccttaaccctggtttaccttccaccatttcagttacgtgcagtcaactgcagtctaaaaatatcacatataataagatatttcgagagagaaagagtacattcacacaactgttgttagaatatattgttataattgttctattttattacttatgaatgccagtctcttactgcactcaatttataaattgaattttgtcatgatacgtatatatgagaaaaacttagtatctacagaattgggtactatccatggtttgaggcatccaccgggggtcttgaacatatcctccagccatgagggggaactactgtactcacctcccaggggtgtggggaggatcaagtggggtataggaaggtgcttagttaactggggttggtgcatggacagagaggtggtggggtgggcacctgtgcccagggagtgctcatctcaatgaaactctcattgatcaaccgcagcagattcaggaactgcttgtcctcatagtcgaagcgacttctgaagacaacggaactgatgacgttggaaacggtgcggctcagcaagaagatggggtcgatgggggcacctgggcagtagaaattgtttatgttggaggcaatgatcatgaatatggggtgtggagtcacagtgatgcatctgagtcccagctctactacttaattgcatgtgtgagccactttatttttgtgttttgagtctagattgaccaatctgcaaattggtttgggaaccgtttcattcactcatgaggattcattatcattatccatataaaataattagcacaatgcctggcatacagtaagcactcaagaaaagctagttgagcttaatcattattttttattattattacttaaatgtgttgttgttagagactcacatatttggggaaaagtgggataagggacacattataaaagttcctgaattctgtctagctctactgatgattccatttgggcaattagaaaaatccttcccagccaggtgcagtggctcatgcctgtaatcccagcactttgggagaccgaggcaggcagatcacaagatcaggagttggagaccagcctgaccaacagggcgaaaccctgtctctactaaaaatacaaaaattagccaggtgtggtggcaggcgcctgtaatcccagctacacaggaagctgaggcaggagaattgcttgaacctgggaggtggaggttgcagtgagccgagatcgtgccattgcactccagcctgggtgacaagagcaagactctgtctcaaaacaaaacaaaacaaaacaaaacaaaatccttcccttgccctcacctacaccttctgtaaaacaagatcagtagatctgggaagaatttctctagaataatgcacatattcataaatacacaattttatgaaaatttctggggtacatgggcatttgaagcttttatgtagacctgttaatcacccatgtagaccaggcaaggcgccttggatgtagaggaaatgtgtctctatttctacctcttatctatttttctggttttttttcagcctctctgtcttttctctatagaccccagtgtttctagaccttattttttggtgggactgaactccttttaaaacataataaaatgagtatagggtttcagatttgcaagataaaaatgttcaaaagatttttttcacaacatgaatatacttaacactactgaactggacacttaaaatgatgaatatggtaacttttatattatgtattttttaccataatacggatatacaaatgtaatgaaatttgagcctgtcttcaagaaaaatcacaaagtcacatgtcaccaaaatctgcataggatatcaagagctcacagacagcctgagatccactgattaaagtttctagtaagtggtctctgagggtcttccatgttaactggttttttttatttttgagacagtctcactgtgtctttcatactgaagtgcagtggcatgatcatagctcactgcagccttgaactcctgggctcaagcaacctccagcctcagccccacaggtggctgacactacaggcatgtgccaccatgcccagctcatgtaaactcttaatatggaagctgccagaaatcttagtggattcttaatattttccctcttcttcctttccagacctttctcccaccaaagctcatcctctcatgactgagagctccataaccacccagtcacccagtggtcctcccccttgtggcccccatacccttggtcttccggaactcctccagtaggtagctggcctcctcctgaattcgctcctcaatgctccgctttcccatcccgaagtcccgaaggatggtcagggggaagcgtcagagaatcctccatcgttctccattggccagagctacacctgccaagatctcagtctcaggcttctgcctccctccccttgctgtgttcaactctgtactagacagtgatggggacagattatgaaagctctagactctgctgtcaaggaagccattctcaaccttcaaggctcaatcaagagagtaaggttctctctctgcaggatcctcaaaaaaaaaaaaaaaaaaaaaagtccagactgaggtggaggaaaagggaatcagtgtaggaatgataggaggagatcaaagagtgtttcttacaggaaggagaggtggaactggaaaaataaataaataactgagtgaatgcataggaaggtggaaggtggagggatgtatggacagagtgccatatagagtgccctggaatggggatattaattctattttctatgtaatacttggattctctgaacgtacacatatgtgtacacagaagctcacacttgtacatcgatatacctacagaaaaggagttatcatgtagtaagacacatttagaaattactaaatgtgtggactgatgagagtcttaaaccaattcactagatctaatgaaattattttgctttattgatgaatggaaggaagagtttatgactggaatgacggatggatggatggacagacggacggacagatggatggatggatggatggatggatggatggatggatggaagacttaatagatgggtggatggttaatggatggatggtttgagatagatggataacagttggagagtggatagattgatagatgtatgaatgatgaaagcattgatgaatggatggaatgatggatagatgaatacatagaaagttaattgacagatgtatagataatagagtgaaagatgtttttatagaaagaataatgagtggattttctgatgaatatggatcagtggacaaaaggaagaaaaggtaatagaaagatagatagatagatagatagatagatagacagacagtatgtggtgagtctgcttggaattgaaggatgtgggcagttagagatggattcttgggagaaaaagatctacctaagtgaagaaggcagagacctatgggttaggtatgtgtatgagtatatgaagatgagaaataaggttggctatgagagctttagtgggtgcataaagaatatcactaatccgccaggcttggtagctcatgcctgtagtcccagcactttgggaggctgagacgggtggatcaccagagattgggagttggagaccagcctttccaacatggagaaaccccgtctctactaaaaatacaaaattagccctgcgtggtggcgcatgcctgtcatcccagctactcgggaggctgaggcaggaaaattgcttgaacctgggaggcagagattacagtgagccaagatcgtgccgttacgctccagcctgggtaacaagagtgaaagtccatctcaaaaaaaaaaaaaaaaaaaaaagagaatatcactaatccattaaaataagagcagaaataacacagaagacacagaagacagtttagagtcggatggcataggttcataataaagtgatcctaccacttactgtgtgacattatctaacctttagcttagcttttttttttttttgagacagagtttcactcttgttgcccaagttggggtacaatggtgtgatctcagctcactataacatctgcctcccaggttcaagcgattctcctgcctcagcctcccgagtagctgggattagaggcatgtgccaccacacccagctaatttttatttttagtttttagtagaaatgaggtttcaccatgttagccaggctggtctcgaactcctgacctcaggtgatccaccccactcagcctcccaaagtgctgggattacaggcataagccaccacacccggcctatcttagctttttcattgacaacattagtataatgttaacagctctcctaagggagtcaatacagtaagtcatgtggactacttaccaaagaacctggcatatagggagtgcattgcagtcatttccggttttattgtttttgttgttgttgctacctaccatgaccttggaagttttgctttattgaagccagttctccacggccactgaactcatccgcttggtctaccaaggcttccttcactgcttcatgtccacataaaaccaccactggccggggacccatgtacacagtgaacacagggctgtatttctccctgagcttggagtgaaggaaaacacagtaggaggggctgattggagtaccaagcataggccaattgaggattttagaggatggcgatttcagagggatataaacatggtactaaggaaccaaggtaaatctgggcttggaaggaatactgggaaagaggcatggaagtcttggctcctgtcacccttggcaaaagctcatccctccccgcaagacttactgtctgcatctctaaaataatggacctggatttgatgaattctaggattcatacttctctctctgaaatgttaaatttctagactcttaagacttcatgataccaactctcaaagtgctaagacaacctgagtcaaagagtccttgtgtttaaaaatataatgtactgtgattccaaagtcctcagatcatgaaaatcttatctcaatgtactgagaatgtgtgtttccaatattttaggattctgaaatttcagaattctaagatttgcaaagtctgtgtttctgagagtctgtctttagaagtcataaggttctatgtgaatctggcaataggattagttgcttttagccctattagaggagacagacagactcaccttcatgaaagactgaaacgtagcgtcagttcgaacttgcagcaggttccccaggaaaggaattggtgtaggacctgggggcagctttcctgccttattcattcatttccaggcaatgaggatgagcaggcaagacaagcagagtgccagaaagatggtgacagcccctcccatctccatggtgccaggtcaacaggttctgtcctgggcaccagatcctgcctaaataggtcctgggagatcagcttataccgaaatctgaacaccctgggattcaagttttccgggtctgaatgtcattggagaagagattgctttatatgggaggtggttatataacctataatctcccacctgagtaagggtagattgaattcacaaagggaaatcctctggggccattcccctttcttcaaatttccagtctctctgttcttctctctcagctcaacagaattgaacagaattttttggtggggtgtaagaggcagattattacctttttaggctattgattttaggatccagacaatctgagtacaagcggcagctctgtcttttcttcactgggcaagtcacttaacctctgggacttgtttctccatctatcaaatagggaaaccatgttgttttattttattttattttattttacttttttgagacagattatcactctgtcacccaggctggagcatagtggcgtgatctcatttcactacaacttctgcctcccgggttcaagcaattctcatgcctcagcctcccaagtagctaggactacaggtgcacaccactatgcccagctaatttttgtatttttctagagatgcggtttcaccatgttggccaggctagtctcgaactcctggcctcaagtgatccaccccaatcagcctcccaaagtgctggaattacaggcgtgagccaccgcagctggcagaccatgttgttttagaaagtcttgatagacaacaaggaaaactctttgttcattatttaattaaggataaccttaattaatcagttattagattttttaaattgacacataataattgtacatatttgtggtatatatatgtacataataattgtacatatgtgtgatgttttgatacatgtatgcaatgtataacaatcaaattcgggtaattattatatccattactgagacattgtcatttctttgtggtaagaacattcaaaatcctctcttctaactattttgaaatatgcaatgtattattgttaactacagccagccaccctactgtataatggaacactagaatgttaataaggaaagtaagctgaagatttagaaaacaagagaaataaatcaattgaaagggttttgttcaaagagttcttgttttctactcaagttaatgttaaataacaataatcaaagattacccatgttggtgtatcagaaatttgctgtatcaaatttaaaaaaagaaaaaaaagaactttgctgtagtgtgtgtcagtgtgtgtgtgtgtgtgtgtgtgtgtgtgtgttttgaaagtctaaggtgtagagatcacctctgaaccccagtctctggaggggaatgtcttaataatctaaaaagtgattaactaccttttctgcaccaaatattttcaaagccttattgtcctgaaatgaacttcctggatattatatcctaccctcatgtactatttaacaaaattcaatgtccttttcatgcgactgtattctcagacttggaaaccgaatccctcaaggtatctgtaggtttggggaatggggtttggctggctgagctgaggcatcctgtgtccagaagtggtggaaattctgggaaagctgagtgactcacacacagtgccaccttttgtctcttggatctgctgctagaatgtctttcttggagtagagactcagctcagcccatctcctttgactcccttagctttcaccttcccatcccattctgatcctcaccccccagcacttaacacccattcaggactaacctcttaaccatcttgtggtggtggcatgtgtgtggtgatggtggttggttgtgagtctggttttcctattcagacaggaagggagagagcaagtactcttagaacagctcccttcaccatcccacctccagacaggaagccaggaatggaggaacttgaactaaagttcagctggagttcagtggtgtgatcttggctcactgcaacctccgccttccaggtgcaagcgattctcctgccttagcctcccaagtagctgggattacaggcacccaccaccacgcctggctaatttttgtatttttagtagagatggggttttgccaggtaggccaggctggtcttgaactcctgacctcaagtgatccacctgcctggcctccccaagtgctgggattacaggcatgagccactgcgcccaaccaaatttttttaatttgtcactttgtgccaggcatggatggagctgtgtgcttgacaagcagggtatcctctaatccaaacaaccagcttgcaaggaagggcatgttaaatagtcagagattattcaggtcaccctaaaacaaatattcttataacctgaagctgctggataaacttttttttttaaactctgtgtaatacctttcatacagaggggaaaggcattcagatgtttcaggtgcttggaggtatagctctcattgtcatctggtttgatatattaaattcatatatgactgtatttgagaaaaggttcatatttcagaggcacctagatgtctcccaatatttgttttccctgtcttccgtagtaatagaattctatccagctacatgattatctagagttaaaaactacatttcccaagctcccttgcagctgcgtatggccgtgtagccaagttctgaccaatgagaagtgagtgaaagtgatgcctgcaactttcagtttatgcttttagagggaggggcaaggtttccttccagaatatttcctctttctggctaactgggatagcaagagcaacaacttaggaaggagcagcagcaacatggaaggagcctgggtctttgatatcagtgaactgcctgatgagctcagggttgcttatgcagagccattaagtgtaagaaaattaaatttccacagggcgcggtggctcatacctgtaatcccagcactttgggaggccaaggcaggtggatcactggaggtcaggagttcaagaccaggctggccaacatggtgaaaccccatctctactaaaaatgcaaaaattagccgggcgtggtggcacacacctgtaatcccaactactcgggaagctgaggcaggggaatcgcatgaacccgggaggccgaggttgcagtgagcccagaaggtgccactgcattccagcctgggtgacagaacgagactccatcttcaaaaaataaagaaagaaagaaaattaaatttccatcttatgtaagcccctttaaaccactgttttgggtctttgttatagcagttaacctatatcttaggaaatttggcttctgtgaaaaatgcttgaaaaatcattgaaccaagataagtgcttgttgccttcttttttattgttgtgtctgagtaccacccatatatgaatttaatgtttctttaattgactctcctttttaagaacttaaattcattaagatggaacttggtatttctccctttaatggaaaattagctattttctatcataactagaaaatacctgtgtattagttatctaatactacataacaaaacagctcaacacttagaggcttaagacaacaacgatttgttatttcccacagtttctgtgtgtcaatgtaatttaatgccatactctcccacatccatggggaagtcttcctggtactcatacctgcccccaacttcttttctgcatctcctttcactcttaaactcaagcttagggttcaagtctaaacacagcatgtcagagcttgaagaggtctcagaaatattattagttcagtgtttctcaaaaggtataaaatgcataatttgacccaatgtatacccatggagtataaatcatcagttgtgagatactgcaagattccttgtaaggaggatgtatgtatggatttgagtattacagatgatgataataaacatatttaacaaccagggcagcacaaacattgtctgaagatggagtagggtcctagaggcctctgtagttgctgaattatgggactattggtaagagtggtcctggagaagtggttgaatttcccatttaccaactgctctcgtttggatgtttgtccctgcaaacctcacattgaaatttgatccccaatgttggaggtggaaattaatgggaagtgtttggttcatgatccaggagttacctgatgtcctcctcatggtaatgaatgggttcttgctctattagttaccatgagagctggttgtttaaaagaatttggccataccctctgtctcttgcttcttctctcactatgtgatccctgcacatgctggctctactttgccttctgctatgagtagaagcagcctgaagccctcaccagaagcagatgctggtgccatgcttcttgtacagcaggcaggactgtgagccaaataaatctctttttattataaattactcagccacagatatttggtaataacaacactaaacaaactaaaataccaacctctatcaaaagatgctctaatagtccaggtgtgttggctcacacctgtaatcccagcactttgggaggctgagatgagtggattgcttgaggtcaggagtttgagaccatcctggccaacatgatgacatcccatctctactaaaaataaagaattaaaaaaaaaaactagcttggcatggtggtgggcgcctgtaatcccagctactcaggaggctgaggcaggagaatcacttgaatctaggagacagaagttgcagtgagccaagattgcgccactgcacttcagcctgggcaacagagccagaccctgtctcaaaaaaaaaaaaaggctgtaataactcgtaggaccacacctgtgtacgtgtgctgaattttgtccttaggcattgtccttaagaagtttccttcttcccaggacaggggcttcatcagggctcgacgcagaacatgcaggtgaggggcagggcactgtgaacctggcagaagagctgattattaaatgttcggtaatgatgtgagcttattatgaaatagtcattattaattaaattacgcaaacaaaaacggaatatattatacttttaaaagaaggtaataagtactcaaggctgatcacatcctaattattttactagagtttaccgttatctgtgctattgagatcgtttatgtctatttgtgtctgtatagtgaaaatactatatgatggcatggttttgcacatctcttcccaactccatgttcagtgacaccaccttggccagttgtttgaaattggccatagtgaatgcatgcacagcacagcaatcagaaaactctacaaatgaggtctttttttcctaagagccagctgataaacatttaccagcacaaccctgtgggtgcttttccaaagctgaagatctgggcttgggatgatgtcagcaggtgcccaagggagagtgggggaagtttttcaggaactcactgatatcaagaggaattctatgtgggttgggatccctgtggaagtctccacctccctttgagcaaaggagatggaagagaaagctaggttggagttcagctggctgtagtgttcatgtcttggataatggcatgcggggagcaccctatgactttggagactgacagacatgaagaccatagaaaaagtaagcctccctctgtgagccttttttcaatctgtgtttgggggatgataacaatagtaccttctgtgtagcgttgttcggggttggtgataacgtgcatcgaaggcccttagcacagactttgcttggcacatgctcaaccagtggaaggcttttagcatgattaaatggttgtaaaatggaatgatcctaagagtccctgaaaatgaggccttggacactatctgtgtctcagtttccccatctggaaaatgggacaaatggttgtattgatcttctgaggtatttgggacaattcaatgagttgtgacacagagcaagcatttaataagtgtttgctaatatgaaaattagagttctgctgcgacagtggagctgggaccaggaaaagctgagtggagaaaggatattcatccccttcaccatcaaaacctgggcaaatctgttggtttcctcttggctgcagtagaagggagggtagctagaattggacattttcttctaaggaggcaaaataagtgtgtccaggagatcttcatgggtagtctaagaagacccattatgggcagtgttttatgggatggttccaggactgagctaaacagcctccccaagctggcattttcctaagattatgctattctcagaatctattgttctaatgtttggggattccagaattctgtgatttttaagttttcaatactatgtggattcttccagttgggagtggggtgcagctttaggaaagtaaggagctgaggagggagaggcagtctcaccaacatccacctcctcctggatgtttttatcagaagcaaaaaggtaaagtcagtgcacagttttggttgctgtaggtcccaacgcaaaacaaatgtgtggagtcctaggaaccaaattttaggggtctgaaggtggtacctggatcattcttctcttggggagtgccatcatttccaagaggctgaagaagagatttggagccaacaaacaagacatagaatttattgaagacttacatatacggtggtcccagagcggccacctggacaggaaaaccactaacgtgtgtaaaaagcatatggtttatacaggattgtcacttagcaagctccacctagcaacctccatttaacccaaaacaaagagccttgatcccttgtatggcctgcattacaacaaatgggccaggggttcagatgtccttcccagatatggagtgaatctctgggttggccactcccttatttcttagctcagaaatcccaacttacattcttcctagaccattctcagggtatgcttgagatattgctgtcaagtatgtcttccatacatagggctgagaaaaattattcaaaacacggcaataaggtaaaactgattatgggatgttttaaagtcaagttaagcatattttctaacaagcccacttaaaggtaatttcattccaaaatggaatgtctctttgtttgcacaattaattagtgtctaagcttttttaacttttattttagcttcaggggtacatgtacaggatttattgtataggtaagttgcatgtcatggggtttggtgcacagattatttcgtcacccaggtaataagcacagtacccaataggtagttttttgatcctcaccgtcctaccacctttaaacctcaaataggtcccagtgttctattgttcccatctttgtgtccgtacgttctcaatgcttagctcccacttacaagtgaagacaagaagtatttggagttttgttcctgtgttactttgcttgggataaaggcctctagtttcagccatgttgctgcaaaggacatgatctcattctttttatggcagtgtagtgctccacagtgcatatgtgccacattttatttatccagtctaccactgataagcatttaggttgattccatgtgtttgctattgtgaatagtgctgcaatgaacatacagcactatttatctatttttatggtagaatgatttatattcctatgagtagagacccaataatggtattgctgggtcaaatggtaattctgttttagattctttgagaaactgccaaactactttccacaatggctaaattaatttccatttccaccagcaggtataggcgttcccttttctctacaaccttgccagcatctgttattttttgacattttaataatagccattctggctgggcacggtggctcatgcctgtaatcccagcactttgggaggccaaggtgggtggatcatttgaggtcaggagcttgaaaccagcctggccaacatggtgaaacccctcctctactaaaagtacaaaaattagctgggcgtggtggcgggtgcctgtcatcccagctactcgggtggctgacgcaggagaattgcttgaatccgggaggcagaggttgcagtgagccagccaagattgtgccactgcactccagcctaggtgccagagcaagattctgtctcaaataataataataatagccattctgactagtgtgagatggtatctcattgtgattttcgtttgcatttctctaatgactagtggtgttaatcattttcatatgcttattggccacatgtatgtcttctttcgaaaaatattcatgtccttttcccactttttaatggggttgtttcttttcatgtaaatttgtttaagtttcttatagattccagatattagatctttctcagattcataatttgcaaatattttctcccattctgtaggttgtctgtttactctgctgatagtttcttttgcagtgcagaatctcattagtttaattaggtcccacttgttaatttttgctttgttgcaattgcttttggcagcttcatcatgaaatctttgccaggtcctatgttcagaatgctatttattccctaggttatcttccagaatttttatgattttagattttacatttaagcctttgatccctcttgagctgatttttgtatatggtgtgaggaaggagtccaatttcaatcttctgcatttggatagccggttatctcagcaccatttgttgaatagggagtcatttccccattgctcattttgttgtctttgtcaaaggtcagatggctgtaggcatgtggcattatttcttggctctattctgttccatttatcaatgtgtgtgtttttgtaccagtaccatgctgttttggtaactgtagccttgttgtacagtttgaagttgggtaatgtgatgcctccatctttgttctttttgcttaggattgtcttggctattcaggctctttgttggtttcacatgaatttttaaatatttttttctaattctgtgaagaatgtcattggtagtttgatacaaatagcattgaatctgtaaattactttgggcagtgtggtggttttaacaatactgattcttcctatccatgaacatggaatgtttctccattggtgtcatctctgatttctttcagcagtatttcataattttcattgtagagctctttcacctctttgattaactatattcctggatattttattcttttgtggctattgtgaatggtattgcagtcttgatttggctatcaggttggatgttgttggtgtatggaaatgttacttgtttttatacattaattttgtatcctgaaactttgctgaagttgtttataagatcaaggagattttgagcagagactagggggttttatacttatagaatcatatctgcaaacagggataatttgacttcctcttttcctgtgtgtatccccctttttttttttccttctgcatgattgatttggctaggacttcccgtactatgtcaaataggagtggtgagacagaatccttgtcttgttctggctctcaaagagaatacttccagcttttgcctgttcagaatgatgttgactatgggtttgtcataaatggctcttatgattttgatgtatgttccttcaatgcctagtttgttgaggatttttaatatgaagggatgttgaattttatgaaaaggcttttctgcaactattgacaagatcatatggtttttgtttttagttctgtttatatgatgaatcacatttactgatttgcatatgttgaaccaactttgtatcacagagataaagcctatttaattgtgatggactagctttttaatatgctgctggattcagtttgctagtattttgttgaggattttggcatctatgttcagcaaggatattggcctggagttttctttttttggttgtgtctctgccaggtttgggtatcagaatggtgctggcttcatagaatgagctggggatgagtccttcctgctcattttttttggaatagtttccgtagagatggtactacctctttcttatacatctggtcgaattcagctgtgaatccatctggtcctgggctttttctggttggtaggattttattactgattccatttcagaacttgttattggtctggtcagggatttaatttcttcctggttcaatcttgggaggttgtatgttttcaggaattcattcatttcttctaggttttctagattgtgtgcatagagaggttcacagtagtctctgtgaattttttttttgtatttcagcgtgtcccatggtaaaattccctttgtcattatggttgtgtttatttggggatcttctctctttttttctttattattcttgctagcagtctatctatcttatttattctttcaaataaccaattgctggactcgttgatcttttgttcatatattgtgaaaagtagtgtgatgattcctgaaagaactaaaacaagaactaccattcaacccagcaattccactactaggtatatactgaaaggaatataaataattctaccataaagacacatgcacatgtatgttcactgcagcactattcacaatagcaaatacatggaatcaacctaaatgcccaaaatggtagactggataaagaaaatgtggtacatatacaccatggaatactgtgcagccataaaaaaaagaacaagatcatgccctttgcagaacatggatgaagctggaggccattatctttagcaaactaatgcaggaacagaaaactaaatactgcatgttcccacttagaagtggtagctgaatgatgagaacacatgaacacacagaggggaacagcagacactggggcctccctgagggtggagggtgagaggaggaagaagatcaggaaaaataactggtgggtactaggcttaatactttggtgatgaaatgatctgcacaacaaacccccatgacatgagtttacctgtataacaaacctgcacatgtacccctgaacttaaaattaaaataaataaaataaaataacatttcataaaattttttaaaacagaaaacatgttcattccctggcaactccaccaaaaaaaaaaaaaaaaaggaaagaaaacatggttatatatacaatggaatattattcagccataaaaaaaagaatgaaatcctatcatctgcaggaacatgggtggacctggaggacattatattaagtaaaataagccaggcacagaaagacaaatatcacacattctcactcataatgggagttaaaaaactgatctcatgaaagtggaaagtagaatgttggttagtagaagctgtaatccctagcaagcttcaacaggggagccaatgctttcagtcagggggtggcaccacgtgtcttcaagatgaaatgcctcttggggacaaacatgctactttcaccaagtacataagctttctgcttgtcatacttaggattgaacattgtacatccttcagaagtacatcctactcagatcttgggacagtatgatccccccattttgggcatttccctcatttttggtttgcattgggttgctgctgggagaaccaaatgtctggcagcttcttggtcccttaaaaaaaaaaaatgtgcagcttcagccaggcacagtggctcatgcctgtaatcccatcactttgggagaccaaggtgggcagatcacctgaggtcaggagtttgccaccagcctagtcaacatggcaaaattccgtctctacaaaaataaaaaaattagccaggcgttgtggcttgtgccttgagatacagtgcagtctcttgtcatccactgcttccttattagagagggtagaaccaacactagctaacatcacgggccatacaggttaagcccatcttaacaattttttttcttttttttgagatggagttttgctcttgttgccccaggctggagtgcagtggcccaatctcagctcactgcaacctccgtgcccacccaccatcccccctcccgcccctgagttcaagcgattctcctgcctcagccttcctagtagctgggactacaattgtgtgccaccacacccggctaatttttgtatttttagtagagatggggtttcactatattggccaggctggtcttgaactcctgacctcaagtgatctgtaagcctcagcctcccaaagtgctgggcgtacaggtgtgagccactgcacccagtcacagatgcagatttcttacatgcatgtattgcatcatggcgaagtctaggctattagcgtccccagcacccaaatagtaaacactgtacctaataggtaacttttcaagcctcaccccctcctgcccacccacctttcgaagtctacaatgtctcttgttccactctgtatgtccaagggtatccattgtttagcttccatttataattgagaacatgtgttatttgactttctggtttgacctctttcacttagggtaatggtctccagttccatccatgttgctacaaaagacatgatttcattcttttttatggctgagtagtattctatgttatacatatgccacattttctttatccaaacctccgttgatgggcttagactgattccatagctttgctattatgaatactgctacaataaacatacaagtgtaggtgtcctttttataaaatgatttctttcttttttttttttctttttttgaggtgcagtctcactctgtcgcccaagctggagtgtgcagtggcacgatctcggctcactgcaacctctgcctccctggttcaagcgattctcctgcctcagcctcccgagtagctgggactacaggcgtgtgccaccatgccaggctaattttttgtatttttagtagagacagggtttcaccatgttggccaggctgttctcgaactcctgacctcaggcgatcttcacttctcgacatcccaaagtgctgggattacaaggcattagccatcaccttgtaatccttgcctaaaatgatttctttcttttgctgtgaagaaactcttttagtttaagtcccatttgtctattttttgttttattgcatttgtttttgaggacttcatcataaattctttgcctaggcctgtgtccaaaagaatttttcctaggttttcttctaaaatttttatagtttcaggtcttagatttaggtctttaatccatcttgagttcatctttgtatatggtgagaaataccagtccagtttcattcttcagcaaatgattatccaatcttcccagaaatatttattgaataggatgtcctttccccagtgtatatttttgctgactttgtcaaagattagttggttgtaggtaggtggctttattttgggttttctattctgttccattgatatatgtgtctatttttataccagtacaatgctgttttggttactataggcttgaagtataatttgaagtcaggtaatgtaatgcctccagctttgttctttttgcttggaattgcttaaactatttgggctcttttctgattctatatgaattttaggattgttttttctaattctgtgaaaaacgacggtgttttgatagagattgcattcaatctatagattgctttggactgtatgttcatgttaatgatgctgattcctcaaatccatgagcatgggatatttttccatttgtttatgtcatctacaatttctttcattggtgttttgtaggtcttcttatagagatctttcacctccctggttaaatatattcttatgtattttattttctttgtagctattgcaaatgtattgcctccttgatttggtccttggctagatcgttaccggtatgtggaaatgcaactgatttttgtacattaattttgtatcctaaaactttactgaattcatttctcaaatctaagagttgtttttagagtccttagggttttctaggcataagatcatatcatcagcaaacagggataatttgacttcctcttttctaatttggatgccctccatttgtgtctcttgcctgactgctctggctaggacttccagtactctgttgaataagagtggtgaaagtggcattcttgtcttcttctagttcttaaagagaatgctttcatcttttcaccgttaaatgttatgtttgctgtgggcttgtcatatgtagcctttattatgttgaggtatgttgcttctaggcctggtttgttgaggatttttatcatgaagaaatgctgatttttattgaatactttttctgcacctattgagataatcatatggcttttgtccttcattttgttgatggaatgtatcacgttatggatttgcatatgttgaaccattcttggatccccaggttaaatccgacccaatcatggtgtatgatctttttgatgtgctgttggatttgatttgctagtattttgctgaggctttttgtatctatgtgattcagggatattgatctgtagttttcttttttgttgtgttcttgtctgattttgttatcaggatgatactggcctcgtagaatcagttagggagaattccctcctcctcaattttttggaatagttttacaaggattggtattagttcttctttgtatacttggtaggattcatctgtgaatctatctggtcctggaatttattttcttgaaagacttttttttgagacggagtttcactctgtcacccaggctggagtgcagtggcatgatctcgattcactgcaacctctacctcctgggttcaagcgattctgctgcctcagcctcccaagtagctgggattacaggcgtgcaccaccacgcccagctaatttttgtatttttagtacagatggggtttcactgtgttgaccaggcaggtcttgaactcctgacctcaagtgatccgcacacctcagcttcccaaagtgctgcgattacaggcatgagccaccacaccctgccttcttgggagacttttaattactgattcaatcttgctattcattattgatctgttcaagagttctacttcctggttcaatcttgatagactgtaactgtccagaaatttattcatttcctctaggttttctagtttgtgaggctatagctgttcataatagtctctcatgatgttttgtgcttctatcctatcagttgtaatgtcccattcttcatttctgattgtttttatttttattttctcttctttcctgggttagtctagctagtggttcattaattttaactttttgaagatccaacttttgttttgttgatcttttttattgttttcgtggtttctatttcatttagttctgctctgatctttgttatttctttggctaactttgggtttgatttgttctttttccagttccttgaggtgtgacattggtcgataatttgtgatctttctactgttttttgagatggagtctcactctgtcacccaggcaggagtgcagtggcgcaaactcggctcactgcaacctctgcctcccaggttcaagtcattctcccacctcagcctcccgagtagctgagattacaggcatgcaccaacatgccttgttaatttttgtattttttagtagagacagggtttcttcatactggccagactggtctcgaactcccgacctcaagtgatccaccgcctcaagtgctgggattacagctgtgagccaccatgcctggccctttctacttttttgatgtaggcattcagtgctataaacttccctattagtactgcttttgctgtatcccacagacttttgtgttgtgttttcatttttattcatttcaaactttttttaaatttccagcttaatttctttgctgacctggtgatctttcaagagcatgctgtttaatgcccatgtatttataccatttccaaagttcctcctagtattgatggaatggaatccttttctagctttatccactgtggtctgagatgatacttgatataattttgatttttagaaaatttgttaaggtatgtttcatggcttaatatatggtctatcttggagaatatatcatgtgctgatgaaaagagtgtatattctgtagttgttgggtaaaatgttttataagtgtctgttgagtccattgggttaaagtccaatttaagtctgtatttgtccatttttgcatcactataaaggaacacccaagcctcggtaatttataaagaaaagtggtttaatcagctcacagttctgcaggcagaacatgaagcatggcactggcatctgctactgataagggtctcaggaagcttacaatcatggtggaaggcaatggaggagccagtgtatcacactggcaagagatggaagggggtggtcccaggctcttttaaacaaccagatctcatttaaactgagtgagaacccactcatcaccaaggggatggcactaagccattcatgagggatctgcccctatgatctgatacctccctctaggccctacctccaacataggggatcacatgtccacataagatatggaggggacacacatccaaagcatatgaaaggctaatgtttctttgctaattttgtctctcaatgatctgtttagtgtatgagtgggatattgaagctccccactgttattgtattctgtatatctcattctttaggtctagttgtatttgtttgtaaatttaggggttgtgatgttcggtgcgtatatattcagcactgttatattctcttgctaaattgatccctttatcattatataatgaccttctttgttttgtttttatttttaatgttttttatttaaaatctgttttaactggtataagatatagctattcctgcttgtttggtttttgtttgcatggaatagctttttccatctatgtactttcagtctatatgtgtctttacaggtaaagtgagtttcttataggcagcatatagttgcatcatggtttgtgtgtgtgtgtgtgtttgtttgtttgttttgagatgagttttgctcttgttgcccaggctggagtagtgcaatggcatgatctcgactcactgcaacctctgcctcctgggttcaagcaattctcctgcctcagcctcccaggtagctgggattacaggcatatgccatcacacccagctaatttttgtatttttagtagagacagggtttctccatgttggtcaggctggtctcaagctcccaacctcaggtgatccactcaccttggcctcccaaagtgctgggcatcatgttgtttaaagtattccgccaatacatatcttgtaagtgaagcatttaatccatttattcaaggttaatattgatatgcaaggctttattcttgtcatattgttaattgtttttaagttgttttatgtgataaattatttgtttctttctttttctctttttgtcattgtggtttgatgagattctcccatgttgccatttgattcttttctcttcctcatgtatgaggttgtttttataagaaatgtgagttttatttttctgtgtgttttcatgacgctgagtgttgacctttcatttccatatttaagacccatttgagcatctcccataggaacaggctagtgttgacaagtttactcaccatttgcttctctagaaaagattttatttctccttcatttatgaagcttattctgccagaacataaaatttttggctgacagtacttttctttcagcagttggaaatgccattctcttcttttctagcctgtaaggtttccactgaaaagtctgctgttagtctgatgagttttcttaataggtaactagatgcttttctcttgctaattttaaaattctttctttcttcttgactttagactttctaaatgtactattatgtgaagttctttttgcaatgtatttgctggggctctgtagctggatgtctaactctcttgctagatgtggaagttttcatcaattacttcctaaaaataggtgttctaattttttaaaatctctcttcccccttggaaataccaaaaatgcataagtttggtcacactatgtagtcccagatatctcaaagtctttgatgattcttttttatttatttttctttattttgtcagacaggacatttcaaaagacctgtcttcaagttcttagattctttttttttcttctaattttagagatagggtttcactatgttgcccaaactggccttgaactctgacctcaaggaatccacctaccttggtcttccaaagtgctgggattacaggcatgagccactgcacccagccatgttctgaggttctttcttctgcttggtccagtctactattgaagcttttgaatatattctgtattcccttcattgaatttttttagttcaagagtttctgcttgtttttttttttaagttatttatctaggtaaatttctcattcatttcctggactgattttctaattctttgtattgattttcaaatttctcttgcatcttgtagggctttataaaatcagtattttgaattctttatctggcatattgagggattctttttgattgggatctgttgctggacaattgtggtcctttgatgatgtcacatttttctcctttttcatgtttcctgtgtcctttcattgatatctgcaaatcttgtgtagcagtagcttgttcaagtttttttaattgccctgtaggagaaaatttttttcctgaaaaatgtatgcatgttgttagttgagtaggatactttggctttgattctgggtgcctatggtagtgtgatcttagtatgacttcataggcagtacccagggtcactggtatctttgatttccttggtagcttagagtacagttattacttgagatcgaggagaaatttagctgggtggtggatgccaactgagcccatctttgggccctggtggtggcagcagcttggagagtatggctgagccccagagcagtctactggctttggtattagtgagtcctgggaggctgattcttgagcttcctagtggcttgcttagaggagtcatgggagttgggggacagggatgtgggcaagttctcaggcccctgggaagcacaacctggtgtgatatgggtgatggcagtagtggtggtggagcaatccactaggacccaggcagtccatgttggtgttgctggtagatgcaatgggttgggtgggctactccccagtcccacagcatcctgtagcagggtagtggtattgacctaagtgtgcttaggagagcttgttctcccctgtgcctcccccatctgggtggcggctacagtggcatcacctcagacttggcaaaaagggggacagagcccaacattaaactcttatgattgtgccagctgtgggcttgtgaccaaagaggacaggcccctctctggtaagcagtatggacaagaagttgtggggagtggggtctgctcaagtctccctgtcacagcagcccatagcagggtcggggaaattgtcccaggtatatgtaaaggagctttgtttccctgtccctccttggccaggtggtggctgcagccaggtcaactcaaactgggcctgagggcagggcatggcacagtattaaactctcaaaatggttccttgggcctgcaaccagggtaagaagctgtggggaatgtggttcactcacatctcagtctcaacagcagcccgcagcaaggcagaaaggaccctcccatgggtgcctgggagtgctgggtctcctctatacttacttgaagcagcacagcagcagcaaccatttctatagatctccagtatccaggttctcaaaacagcactcagctgaggctgctctaggctcaaatgggattccatgtgggttccattttccagggcaatgtctctgcacaatctttagggagctccgtatgtcaggcccaagacccaagtgggttgagggtttctaccatagccaagatcataaaagcccatttcaaagtgtggagccctgggagtttctctcttataatttcccctcatccaggagccactctcagctttcagtcaatcccctctccttactcacttcctgtgcttcccttcttttctctgttgaatcccttctcttctctgatgaattccagcattctctcctagataatctgtttaaaatggagttcctctccacgaagaaggccatgctacctgcatctggtcagccatcttgatcacctttctacatttaaagagacacagcatgttaaaaaaaaaaaaaaaattagttcccttacgaattgttgtttacctagccctccctgtcaagaagtggtctgcattttaaaggattttaataagatgaaaaatattctagaataaatttgcagtgaccccatctcccattcttcctgtggtaaggaagaccaaaagctattttttttcttttttcttttcttttctttttttttttctaaaggaaacccctttctcctaactcccttcagaatctgctgctttttttcaccccccagtgatttcagggaattgggttgttaaaaatgttttcttcagagttaatagtttttattcacgggatgcttgctccaaaagaagctactcaaccattaccagaagaaactcttcatcagtgcacttggcagctgacatcttcgtcctcttaaaaaataaaaataaaaataaaaattttttaaagttgttcagaaatggtggctcaaacctgtaatcccaacactttgggtggctgaggcgggcagatcacctgatgtcaggagttcaagagcagcctggccaacatggtgaaacaccgtctcttcaaaagtacaaaaattagtcgggcatgatggtggatgcctgtaatcccagctgctcaggaggctgaggcaggagaattgcttgaagccaggaagcagaggttgcagtggaccgagatcgcgccattgcactccagcctgggcgacagagcaagactccgtctcaaacaaaaaaagctgttcatccctgtcatctatccaacttctttcccatctctgggctctaagtcttgccattttcctggtaggcaggaacttcatggccatggatgtgagctgtccaaacactcagaaaaaaagaatcttgactttcttctcttctttgacctcctttactctatttcagccaacattcccatagccccaccctaatccttgtcatcactctgaaatgtgaaacacagacatttcactctctgaccacaaccactaataccccaactcccccactgcttcattgacaatggcctgaggggtatactggccaactaggtcgttggttaaggttccgaagagtgcaaacactatagaaggtcaagtctccctcctattaaaagactttttttctaacattttgaaaacttttgttacatgtttacaaggaagtatttgaagaagagattacaggcagtttttctaatatttcataaagaaaaacaggtggggcctggcagtccaaagtggtgattaacagcatgaaatttactttcacagccaggcatggtagctcacacctgtaatcccagcactttgggaggccgaagtgggtggatcacctgaggtcaggagtttgagaccagcctgacaaacatggtgaaaccccatctctactaaaaatacaaaaattagctgggcgtggtggctggaatcccagctacttgggaggctgaggctggagaatcacttgaacccaggacacagagattgcagtgagccgagaccgcaccattgcactccagcctgggcaacgagagcgaaagagcaaagctccatctcaaaaagaaaagaaagaaagaaaagaaagaaagaaagaaagaaagaaagaaagaaagaaagaaagaaagaaagaaatttacagtcacacaagaccatactaagactctaccctcattagctgtggaatgcggaagcaagtcacttacaaccaactttgggggccttacctaactcatttgcaaaatggagatgataaagccaacctcacagtcttgcaatgaggagtttaactaagattatgctcataaaaagcttcccacagttctggggttttcttcaagcggataaatggagctgggctaggactgttttaatccaaacacagatgagcacaggaaaatatcagatgttgacatgtatgcaacatggcccacaagcctgcatacagacaccagaatgcacacatgagaacatccacatacttatatgtagtcacccaattgtgaatgcatacatacaaacatgaatatgcggcattcatcttgttttacacagaaatgcacatcatagacacccctaaatcatgtgtgcacacatgctgtatgcagagacagacacatagattggcaagcattgagaaacagtggcacaccctgtcaggcacacacacacatgtgcatgtgcagacataagttggaatggatacccattatcaagcacaaacatacaccccacaaagcctggtgcacacataaattcatgtatcaacatggacatacagaaacatacatgcacatagacactaccagaatgacacacagacagttgaataaatgaggataaacatggcagaggcatccaggagaactcactggacaaaatggcacaaaatacaaagatgcaggagcacacagggtgattgagggaaacattgacttgcagggaaggagaaagagaagatagaaagacaggatccaagacaacggtagacagacaggtgggcaaagtcctgtgcagggctccagggccaaccagaataacctgagagtctaatgctggcctgtccttccacagatactgcctaactcagcaccacactccaggaggccatgaaggattaatttcctattcacagctccatggagtaaagcttggctgtgctgaggaaggggtggggaaagaggttcccaaagactctgtccttttcctccttcccaaaggaaaagatctgtgagctttagactagagaatgtaaaagcaaggaatgtgtttagggaacatcttatccatccgcttcatcgtacagaggaaagagaacaactgctattcattgagcacttactgccatgtacctcacctgcattaacacatatacttctcccctaaatagctgaagaggtaagagctgttcttggctccataaggctcagagataaagtcagctattcaaggccacacaacaaagaagggataaggttaggattccaatccaggccttaatcattgcaccatccatccagaaaaggaaactgaggccaagcaaaggaaagggatcttcctgggttttccactaactcactctgaaaggctgtacccaagacactgcccactgggacaagtccctcccacatgatttcagacaccattctctcactccatgctccagggtaatcaacaagtccaaaattgattgacctctatgtccacaaacactagagttctccaaacctgtctctccccaccccctccctggccagatcatggcaacctgctgatcactcagtgcacttcctagtgccaacctcactgagaaacaaagttcccgaatttctatctcccacctttttaaggaactagaaggaaaaggaggagcccaggcttagggccagcccaggtgcaggctggtgaccaggattagagggattgatatctgccaagctggtgctaatcctccttcccacctcttcccctccaaaatcaacaaacaactttcctctgtcccctttgttctctgatctttgttccctccacacaggtctcagagctcagcatcctagaacactttgagcaagatgtcagtcctgggggggccaacctcacccacctccacttgtccacagttggtgacccagaggagaggtgcaacagtggaaggtccaaacatcagagcctgtcctgtgcccatctggagcccctctcagggtctggctgaggctcatctcagacccacataggaccaatatcaacacctgcctcatgctcatgtcagagcccactgggaccaacctcagaccctatatggtgccactcttatgccctcctgaagcaggactctcttatgccctcaatgacacctgagacaacacacagagccctcttggcaccaaacatgacttcaatattctcctggtgtcaagttcagtgccaacttgtttcccatcctcgcatacacctgggggcagtcccaaagccaacacgatgcctttccctccctggacacacctgatgctgatatcagaacccgccaatgtcatcagtgtgtccactgctgatgccagtcccagcactcacctcctgctaagcctggcctgcacttgactcccagggtgatctaggccagtcaatgaaggggggcgaggagaaagttcacatcccagctccctcacttactccctgtgtgacctcactcaagaggatttatggagtctagatctgctcatcttcaaaatgaggatgatcatgatgaaccaacctcactgttacaaagattcaaccagatcatacacacctagacttaatcttcccatatatgaccatgctcaccaaagggtaactgtcctgtttactaaggaagaatttccttgagggaaggacaggagggctactcatcccttctccactcacacccaccccaggatctgcctctgtgcctaatactggagtttaccccaatctcttctgcgattgttccctctgcctactaatagtagtagcccctgacaaagcaggaatcgcccttaaaggagacttaactcaccctcaaacgtggtcttctcttcccaaacactccctttccactggcaggaaaaccaaatccagaaagtggaactaaagacgcagagcaagagagatgggagttcagggccactcacacatgtcccctgcccactgtctgttttctgtcctctgtagatctttatataaaatgagaaacataaataacaatcatagtattaatagggatgatacaatcaatctagtgggtttccctaagaatctgggttggaaaccagtggagttcttcgtaaattacaacccttgggacacttgagatttttccagcatttgagggttgttattactatttctccagacctagccaatcccctctgccaactggtaacatgaggtactcttctccacgtgtggggaaagttcctctgaaatatggctctcgtcttctgcccctttcccagccagagatgggcagcggaggttctatggcacccatcctggcctcactctgaggttccaatgaggattctgggcatcaagagacagctctgggtcaaagcaaaatcaagtcagtccctgggcccagtgctgggctgctgggctttctgggagcacctgctgggcttgctacacactccacctcccagaaactccacacccacagccctgggtcttcctagccccaagactttcaagtccatatgcctggaatcccccgtcctgagacccttaaccctgcatcctccacaacagaagacccccagatgcacagccacacttccatctcaccctagtaaaacccagacctttggattcctctcccgtggaatgcccaaatccacaactttggggtgcattctcactcccagatcccaaatccaaagtccaggtgctcccctgtgcaaatattccaaactcctcagttccacagtttatctgttgcccgctcctaaatccacagccctgcagcaaccctcctgaagtaccagatttagtctggagttcccctccctgttcagcttccctggggtccctctcctcctcccttgctggctgtgtcctaagctgtgtgggattcagggttggggtgtagttgggaggtgaaatgaggtgattatataatcaaccaaagtccatccctctttttcaggcagtataaaggcaaaccaccccagccatcaccatctatcatcccactgccaccatgctggcctcagggctgcttctggtgaccttgctggcctgcctgactgtgatggtcttgatgtcagtctggcggcagaggaagagcagggggaagctgcctccgggacccaccccattgcccttcattggaaactacctgcagctgaacacagagcagatgtacaactccctcatgaaggtgtcctaaggcagggagatgggtggcacggggtgggggctgcccagttggctggggctttgtggcaggggattgaccagtgtggaccagagtcttaggaaagggagtcttggagtttcagcatcagggtcctagcaggaaagacaggatcttgggatgtccagctccctgactgtgagaacctgggggcgaagcatcccagtacatgatatctcagtgctgggcccattcagagtgggggctgctccctctaaccactcccacctgcctccaacagatcagtgagcgctatggccctgtgttcaccattcacttggggccccggcgggtcgtggtgctgtgcggacatgatgccgtcaaggaggctctggtggaccaggctgaggagttcagcgggcgaggcgagcaggccaccttcgactggctcttcaaaggctatggtgagggggtgcccaagagggggaaggtggccaggtggatgcaatggtctccgtgtccccagccttctccctgactctcctgcccactggaggctatggcagagccccctgtctggtcttctctccccatctcccttcatcgtggcctctccctgtgcgtccctcacctgtctccagcgtccctgtcgtgattcctccctgcctctctctgccccgtctcctccttctctctcactggagtctcctctttcccctctctctccatctctgaggacatcctgggtttctgttttccagccctggtcctctgtcttcatttgtctttttgtcgctctcggcttctgtgcttctccgtgtttctcctctctctgcttccctctcccacttcttcctctgtcttaggatttcagggtattcctacttccacatctccagcctccaactcctggtaattgtctgtcctccttcccgatcctctctgtttctgtctccatatttttctctcttctccagttcagcttaagaatctttcaccatttttatttcctcctcccagatctccccatatctcacttcccctccctccatctctctctttctctccccacttccttcccttcctccatggagtatccccgtatccctctgtttctctgcatctgtctgtctggcctttctgcttctcttctgattctcttattctttctacccggtctctctctctctctctctctctctctctctctctctctctctctctctctctctctctctctctctcgtgctctcgtgtttctctgactgagtttgcagctctcctgggcactcgcgctgaatccatctctctcccaccccactccctctctgctccacccttggggagccccttggagctggtccgctcctgctcccgccgccccctgacctctctccacccccgcgttcacctccccaggcgtggcgttcagcaacggggagcgcgccaagcagctccggcgcttctccatcgccaccctaaggggttttggcgtgggcaagcgcggcatcgaggaacgcatccaggaggaggcgggcttcctcatcgacgccctccggggcacgcacggtgagtaggggaccccgagtgcgagggcgggaacccgcgctttctgcctggggatggggactaggtggggaaaggggcccgcacttccagccctggagtctggcgctgggattcggctcaacagggccctgcctcctggaattctgactctcctcagacctctgagttgactctctccccaacccccttctcccgccacacctgcaggcgccaatatcgatcccaccttcttcctgagccgcacagtctccaatgtcatcagctccattgtctttggggaccgctttgactatgaggacaaagagttcctgtcactgttgcgcatgatgctgggaagcttccagttcacggcaacctccacggggcaggtaactggctgcagcccgccagtgacgcccctaccacaacctgccaactgctcccctacctggagacaggtgccccaaactcccacccccctccagacagtgtcccctcaaaatcagtccccgatattggacaactggacggttgcaccagaacccaggagggatgcccaatacccagtctccaaggacacctggatagctcaacagatgatccccaaaacagagcctgctggcaggatgcataccctcagctcagctctctcacctgggcacatgttcccatccccaacttaccgtaatttgtaacaggtgctccctacccagttcttctgaatattttaacacctggacaagtgactgcgtcaacccgcctcctgcatacctgaacacctggtgctgcaaaatccagcccatcataatcatttcacatctacacaaatgtcacagattagcccactggaatatctggccaagggccctctacttcacccacttaaatgcctgaaaacatggacaggtgccctaaccaataccctaaacacataaatatctagatagattattccctgacacccaaataagtgttccccaaccctttccaatcacacaccttacagaggtgctcccagtgcatcccacttggataggtaaacacctcaacaggtatcccctccacttcaacatcttcaccagccccactttaatacctgaacacctgaacaaaagcccccaatccagacccagtaagtatctggacagctgtctccaaccaagtccacttgaatgcctaaatacctagacaggtgccactcacctcataccagccccacctgaagagctaaacacctggacaggtgtcttccaactcaacttcacttgaatatctgaacacctagatgtgtgctccaatccagcctcatttgcatacctgaaacctggatatatgcctcagttcttctcacctaaattactagaccgtggccctggcacctaatccacgtgaaaacttagatataagtttccatccaaccccactgaaatacctaaacacctggacagatgcctttaactccgttccttccttgctatgaaacaaatccccattcccatcagctcctgccccgtgacagctgtccttcccttcccatcctctctctgcaaccccagctctatgagatgttctcttcggtgatgaaacacctgccaggaccacagcaacaggcctttaaggagctgcaagggctggaggacttcatcgccaagaaggtggagcacaaccagcgcacgctggatcccaattccccacgggacttcatcgactcctttctcatccgcatgcaggaggtacatcccagcagccagtgcaggcaggtgcaaagccagggagagggaaatcaggatgggagtggggtgggcagacgacacaggcccattcaaattagccctcgtcataataatccttacaattggccaggcgcggtggctcatgacctgtaatcccagcactttgggaggccgaggcaggtggatcacctgaggtcaggagttcgagaccagcctggccaacatggtgaaaccccgtctctactaaaaatacaaaaatgagctaggtatggtggcatgcgcctgtaatcccagctactcaggaggctgagacagaagaattgtttgaatccgggaggcagaggttgcagtgagccgggatcatgccactgcactccggcctgagtgacagagcaagaccctgtaaaaaaaaaaaaaaaaaaaaaaaaaaaaaaatcctgacaatcccaactacatcaaccactgctgttccatctactgagccctcacccacaagcacgacttatgcacgtgcattagaatagcaagcacttctacagcactaccgtgtgccaggcactgcgttaagtgctttaagatagtccgccatggaacacttataacagctcttgaaggaggttcaatcatggccccaattgtacaaatgaggaaactgaggcccagagagtttaagtgtcttaactgaggtcacacagtgaggaagccatggtcccccaagctcaaaccctggtctctctgagcctaaagctggtgcttttagccaccatgctctctaaccgttcatgtcctggttagcagacacacctctgtggacaggtgacctggctttacattgcagggtccccgcctacctctggatgtcagcctcccatgtgggaaggctttagggaatccaaagctcagggagaaaggatcaagggagggattcctccacagtaagtttcaagatttttagggaagaaataggatgctgttgcttaaaattctgtgcttgtatctcagaaaaactctttttttctgactcttcatcttgccatctctgtactactttctcttcgtctcccctcatccttctctttccaaatattcctatcattaaaaaagtaacagactgggaaacatggcaaaaccccgtctgtacaaaaaaatggctaggcatggtggtgcatgcctgcggtcccagctactaaggaggttgaggtgggaggatagcttgagcccagggtgggcagaggttgcaatgagccgatatcacagcactgccctccagcctgggtgacagaataagaccgtgtctcaaaaaaaaaaaaagaattaattttttaacagttaacaagtgagcctgcatagtcatgtgcatgtgcagttccagctactcaggaggctgaggccggaggattccttgaacccaggagttggagtccagcctgtgcaacttagcaagaccaagtctgtataagaaaaaaaaaaaaccaactgacagctaagttgacaattaaaggatagatgatcagtgaggtaaagaaggtgagaaggaagagcattttgggcaaagccagcagccagggcaagggctggaacctggagcgagtttggcaaatctagggtccctctttccacctttggtctggaccaaagagaggtagctccaaaggaaaagccctagaagggccccaagagcatggagagtgagcttggtctaaaccgccctctccctgcaggaggagaagaaccccaacacagagttctacttgaagaacctggtgatgaccaccctgaacctcttctttgcgggcactgagaccgtgagcaccaccctgcgctacggtttcctgctgctcatgaagcacccagaggtggagggtaagactggaaagggaggaaagtgaagggccccagaccctcaaaactcccctgagcctggtgcagtgtacccacctatcccagatcccaggaccctgagacgtgccttgctgtccagagacaggacaatattcagctgataggcatcagctgagtctcattagctattaaaatattgaaaatgtctgcactgattggtcagtcactcctgtcccaagcccactgagtgtccgctgcctgctcctctggatcatcccctaagttcctccctgtgcctaccctgtgattctgacacaacctggtttaacaggatcctgctgcaacaatgcgaatggctgatgtctgttctgttatgaatggtctacctccgtgtcataggtggagctatgtcaaccaccgtgttttacctattcggactatcatccctgctctaagacccctagacacctaaacacattcccctcctcccccagccaaggtccatgaggagattgacagagtgatcggcaagaaccggcagcccaagtttgaggaccgggccaagatgccctacacagaggcagtgatccacgagatccaaagatttggagacatgctccccatgggtttggcccacagggtcaacaaggacaccaagtttcgggatttcttcctccctaaggtgctgtctcccctccaccaccaccactcagactacggggacttccagcctctctctgtgtccccagaatcctgcccccattagtgttctagactctgtcccactccctcaatcagtcaaaaaagacttccccaaccaccacatctgttccacctttccacttagacagtcctgagtcctgcatctcgccagactctttgtgtcaggagaatacaccccatgttcccaaacttcctgtcttaagaaacagaagccccctttccattaggccttttgccttagggacacaaatctcaggtccctcaaacaccctgcctagtggaacatggaccccatgtctcccaaacttcctgtttcagagacatgaaacttctatcccccaaagctcctccctcagaggtccccaactcctccatgcctgccactcccctcacctggggcaccctagttccccctgcagcccctgtgtactttcaccaatccccccaacctgcctcattacacacaccttcctcctccctcccagggcactgaagtgttccctatgctgggctccgtgctgagagaccccaggttcttctccaacccccgggacttcaatccccagcacttcctggataagaaggggcagtttaagaagagtgatgcttttgtgcccttttccatcggtaagagaccactgtttgctgccaggccacggctcacaccagcaggggcctctctcacccacctcccctctctgcggtgtagcctggtatttctccagcttggaagttcctgttagaatctaccattgagccgccaccagctgatactcccttaactgccaagcacccaatacctgcgcccaggtaaaagggaaggaaacatcttcccccatagatttatttgtctagggtcacacagcagattcttcagctccctgaaaaggagataatggcacagcacagcagtcatatttgcaagtgtatctggggggtaggggcatctaaacctcccattgctacacctggcatggatcaccccatctatgatggaggcatgacattatgcctttttcaaaacccatagaactgtataacacagagtaaaccctaatgtaaactatggactttggttagtaataatatatcaatattggttcaccattgttatatctcttatagaaggaaactgaagctcagggaggatcggagtctcctctgaaagtctctcaggccataatattccacccctcctccctagagagtgcagccgggggtcagtaggggttgaggctgcactgagagtgggcttcaccttcacccctcctgcctctcctcctcaggaaagcggtactgttttggagaaggcctggccagaatggagctctttctcttcttcaccaccatcatgcagaactttcgcttcaagtcccctcagtcgcctaaggatatcgacgtgtcccccaaacacgtgggctttgccacgatcccacgaaactacaccatgagcttcctgccccgctgagcgagggctgtgctggtgcagggctggtgggcggggccagggaaacggccggggcaggggcggggcttgtgggaggggcggggctaagaatgggggcagtgggggaaggaaggggagaggtggttagagggaacagaagaaacagaaggggctcagttcaccttgatgatgtccttcagagctgtgatgagaggaagggaaaccttacagtatgctacaaagagtagtaataatagcagctcttatttcctgaacaagtacctccgtgtcagctttgttcaaaaagcgttgcacgctcacctcacttaattgccacaaacctctacgaaggggaaaagcgttcatgcccattttacacgtgacaaagctgcggctcagaaagttgtctctatctgatttctcacaaaacgtaagtgcccagaaaatctttgaacacagatctgtgcccatagccctctagatagattcttaaaaagcaccccttcctcacgtaaaatagcttagtatagcatcacatggcctgaacatccctgtcctggggggttttccagagacctggcgggcggctgtcctgccttctctgcacactttcctactcggcacgctttgaacaccagggtgtaatctgagctcgctaccaggtaaggccactgtggcccaatcagagtcagtctaggacacaacgagacatgaatggacatacagagtcagtccattgacaattcctttgcagagcagaagtttttaattttaatgacattctgtcattgtatctcttaatgaagaagttgaaggagagaaccactttaatgccgggagaactctggatcaggacataccatacgcatgtttgtgatcatgtgcaggcatgcatgtgagcatatgactgcatattctcctccgtgtatgcatgaaacacattccactatgggtttctgaaggtggggctctcctgatggatctggggtctgttgtaagacccagctaagagtttcacaatcacctgcccactctcaaagacgttagtgtgtgtcccccttagaagctcccttacagcattcacgaaaattaactccaagtttattgtagacctaaatgaaaagtgagtataaacttctagaagataacgtaggagaaaatctagatgaccttaagtttggtgatggcttattagatacaacaccaaaagcacaatccttgaaagaagcaattgataagttctgagtcattaaaataaaaaatttctgctctgcaagataattgtcaagagaatgacaatacaagctacagactgggagaacatatttgcagggaacatacctgataaaggacttacattcaaaatacacaaagaactgttaaaactcaacaatagaaaacaacccaattaaagaatgggcaaaaatctgagcagacacctcaccaaataaaatatacacacagcaaataagcataaggaaagatgctccacatcatgtcagtagcaatttcaaatttaaaaaataatgatataccgttacctacctattagaatggctaaaatccgaaactgacaacaccaaatgctgacaaggaggtggctcaacaggaactgtcattcactgatggtgggaatgcaaaatggcacagctactttggaagacagattggtggtttcttgcaaagctaaacatattttcactatgtgatacagcaatcatgctcttctgtattaacccaaatgaattgaaaatgtatagccacacaaaaatttctgcacagatatttatagcagctttattcatagttgccaaatcttctaagcaaccaagatgttcttcaataagtgaatggataaatgaactgtggtatgttcatacaatgaaatatggctgggcgtgatggctcatgactgtaattacagcactatgggagaccaaggtgggcagatcgtttgaggtcaggaattcgagaccagcctggccaacatggtgaaaccccatctctactaaaaatacaaaaactagccgggcatggtggcatgcacctgcagttccagctacttgggaggctgaggtgggagaattgcttgaacccatgaggcagaggttgcagtgaactgtgatggagcctctgcactccagcctaggtgacacagtgagactttgtctcaaaaaacaagcaaaaaaaaaaaattatttggcaatacaaagaaatcaggcctcagaaagacatggaagatctgaaatgtatgtagctaagtgaaaaaagccagtctgaaaaggccacatcctatataattccaactatatgacattctggaaaaatgaaactatgaagacagtacaaagatagtagttgccaggagtttagggaggaggaagtatgaataggtgcagcacatgtggtttttagggcagataaactattctgtatgatactgaaatgctacatgacattatgccttattcaaaacccatagaactgtacaacagaaaaaataaaccctaatgtaaactacagactttggttcataataatatatcagtattgattaatcattgtaacaaaggtatcatacttacacaagatgtaaggtatataggaactttcttccattccaagatggatgaatagaagcaactccagtctgcagctcctagcatgatcaacacaaaagatgagtgatttctgcaattccaactgaggtacctagttcatctcactgggactggttggacagtgggtgcagcccatggagggtgagccaaaacagggtggggtattgcctcacccgggaagtgcaaggggttgggagatttccctttcctagccaagggaagccgtgacagagtgtacctggaaaactggaacactcctgcccaaatactgcgcttttccaatggtcttagcaaatggcatgccaggagattatatcccatgcctggctcggcaggtcccatgcccacagagccatgctcactgctagtgcagcagtctgagatcaaactgtgaggcagcagcctggatgggggaggggtatccaccattgctaaggtgtgaggaggtaaacaaagcatacagggaagctcgaactgggtggagcccaccggagctcagcaaggcctgttgcctctgtacattccacctctgggggcagggcataactaaacaaaaggcagcagaaacttctacaaacttaaacatccttgtctgacagctctgaagagagcagtggttcttccagcatggtgtttaagctctgagaatggacagactgcctcctcaagtgggtccctgacccccatgtaacctaactgggagacacctcccaggaggggctgactgacatctcatacacacaggtgggtgcccctctgggatgaagcttccacaggaaggatcaggtgccaatatctgctgttctgcagcctccactggtgatacgcaggaaaacagggtctggagtggacctccagcaaactccaacagacctgaagctgagggaactgactgttagaaagaaaactaacaaacagaaaggaatagcatcaacatcaacaaaaaggacatccccaccaaaaccccatctgtaggccaccaacatccaagaccaaaggtggaaaaaccagagcagaaaacctgaaaattctaaaaaccagagcacctcttctcctccaaaggattgcagctcctcaccagcaatggagcaaagctggacagagaatgactttgatgagctgacagaagtaggcttcagaaagtcagtaataacaaacttctttgagctaaaggagcatgttctaacccattacaaggaagctaaacatcttgaaaaaagactagatgaatggctaacgagaataaacagtgtagataagaacttaaatgacctgaaggagctgaaaactatggcacaagaactacatgacacatgcacaagcttcaatagccaattcaatcaagtggaagaaagggtatcagtgattgaagatcaaattaataaaataaggtgagaagacaagattagagaaaaaagagtaaaaagaaatgaacaaagcctccaagaaaaatgggactgtgtgaaaagaccaaatctacgtttgactgatgtacctgaaagtgatggggagaatggaaccaagttggaaaacacccttcaggatataatgcaggtgaacttccccaatctagcaaggcaggacaacattcaaattcaggaaatacagagaacaccacaaagatactcctcgagaagagcaaccccaagacacataattgtcagattcaccaagatggaaatgaaagaaaaaatgttaagggcagtgagagagaaaggttgggttacccacaaagggaagcccatcagactaacagcagaactctcggcagaaattctacaagccagaagagagtgggggctaatattcaacattcttaaagcaaagaattttcaactcagaatttcatatccagccaaactaagcttcagaagtgagggagaaataaaatcctttacagacaagcaaatgctgagagattttgtcaccaccaggcctgctttacaagagctcctgaaggaaccactaaacatggaaaggaacaaccggtaccagccactgcaaaaacaggccaaattataaagaccatcaaggctaggaagaaattgcatcaactaacgggcaaaatacccagctaacatcataatgacaggatcaaattcacacataacaatattatccttaaatgtaaatgggctaaatgcctcaattaaaagacacagactggcaaattggataaagagtcaagactcatcagtgtgctgtatttaagagatccatctcacgtgcagagacaaacataggctcaaaataaagggatggaggaagacctaccaagcaaatggaaagcaaaaaaaaagcagtggttgcaatcctagtctctgataaaacagactttaaaccaacaaagatgaaaagagacaaagaaggccattacataatggtaaagggatcaaatcaacaaaaagagctaactatcctaaatatacatgcacccaatacaggtgcatatatatttatgcacctagattcataaatatgcactagattcataaagcaagtcctgagagacctacaaagagacttagactcccacacaataataatgggagagtttaacaccccactgtcaatattagacagatgatcgagacagaagcttaacaaggatatccaggaattgaactcagctctgcaccaaatggacctattagacatctacagaactctccaccccaaatcaacagaatatacattcttctcagcaccacatcgcacttattccaaaattgaccacatagctggaagtgaagcactcctcagcaaatgtaaaagaacagaaatcacaacaaactgtctcttagaccacagtggaataaaattagaactcaggattaagaaactcactcaaaaccgcacatctacagggaaactgaacaacctgctcctgaatgattactgggtacataacgaaatgaaggcagaaataaagatgttctttgaaatcagtgagaagaaagacacaatgtagcagaatctctgggacacatttaaagcagtgtgtagagggaaatttatagcactaaatgcccacaagagaaagcaggaaagatctaaaattgacaccgtaacatcacaattaaaagaactagagaagcaagaacaaacacattcaaaagctagcagaaggcaagaaataactaagatcagagcagaactgaaggagatagagtaacaaaaagcccttcaaaaaatcaatgaatccaggagctggttttttgaaaagatcaacaaaatatatagaccactagcaagactaataaagaagaagagagggcagaatcaaatagatgcaataaaaaatgataaagagtatatcacaaccaatcccacagaaatacaaactgctatcagagaatactataaacacctctatgcaaatacgctagaaaatctagaagaaatggataaattcctggacacatacaccctcccaagactaaaccaggaagaaattgaatctctgaatagaccaataacaggctctgaaattgagaaaataattaatagcctaccaaccaaaaaaagtctaggaccagagggattcacagccgaattctaccagaggtacaaagaggagatggtaccattccttttgaaactattccaatcaatagaaaaagagggaatcctccctaagtcattttatggggccagcatcatcctgataccaaagcctggcagagacacaacaaaacaagagaattttagaccaatatccctcataaacattgatgcaaaaatcctcaataaaatactggcaaactgaatccagcagcacatcaaaaagcttatccaccacaatcaaacttcaccacaatcaagggtgaaccagccttggcttcatccctggaatgcaaggctggttcaacatacacaaatcaataaatgtaatccatcacataaacagaaccatcgacaaaaaccacatgattatctcaatagacacagaaaaggccttcaacaaaattcaacagcacttcatgctaaaaactctcaataaattaggtattgagtgaacatatctcaaaataataagagctatttatgacaaacccacagccaatatcatactgaatgggcaaaaactggaagcattccctttgaaaactggcacaagacagggatgccgtctctcaacactccttttcaacatagttctggccagggcaatcaggcaagagaaagaaataaagagtattcagttaggaaaagaggaagccaaattgttcctgttcacaaatggcatgactgtatatttagaaaaccccaacatctcggggagcgcctctgccccgccgccccatctgggatgtgaggagcgcctctgcccggccgagaccccgtctgggaggtgaggggcgcctctgcccggccgcccctactgggaagtgaggagcccctctgcccggccagccgccctgtccgggagggagctgggggggtcagccctccccccggccagccaccccgtctgggaggtgaggggcgcctctgcccggccgcccctactgggaagtgaggagcccctctgcccggccagccgccctgtctgggagggaggtggggggatcggccccctacccggccagccgccccatccgggagggaggtgggggggtcggccccccgcccggccagccgccccgtccgggagggaggtgggggggtcagccccccacccggccagccgccccgtccgggagggaggttggggggggtcagcccccctgcccggccagccaccccgtccgggaggtgaggggcgcctctgcccggccgcccctactgggaagtgaggagcccctctgcccggccagccgccccgtccgggagggaggtggggggggtcagccccccgcccagccagccgccccgtccgggagggaggtggggggggtcagcccccccgcccggccagccgccccgtccgggaggtgaggggcgcctctgcccggccgcccctactgggaagtgaggagcccctctgcccagccagccgccccgtccgggagggaggtgggggttcagccccccgcccggccagccgccccgtccgggagggaggtgggggggggtcagcccccctgcccggccagccgccccgtccgggaggtgaggggcgcctctgcccggccgcccctactgggaagtgaggaacccctctgcccggccaccgccccgtctgggaggtgtgcccagtagctcattgagaatgggccaggatgacaatggcggctttgtggaatagaaaggcgggaaaggtggggaaaagattgagagatcggatggttgccgtgtctgtgtggaatgaagtagacatgggagacttttcattttgttctgcactaagaaaaattcctctgccttgggatcctgttgatctgtgaccttacccccaaccctgtgctctctgaaacatgtgctgtgtccactcagggttaaatggattaagggcggtgcaagatgtgctttgttaaacagatgcttgaaggcagcatgctcgttaagagtcatcaccaatccctaatctcaagtaaccagggacacaaacactgcggaaggccgcagggtcctctgcctaggaaaaccagagacctttgttcacttgtttatctgctgaccttccctccactattgtcccatgaccctgccaaatccccctctgtgagaaacacccaagaattatcaataaaaaaataaataaataaataaataaataattaaaaaaaaaaaaaaaaaaaagaaaaccccaacatctcagcccaaaatctctttaagctgataagcaacttcagcaaagtctcaggatgcaaaatcaatgtgcaaaaatcacaagcattcttatacaccaataacagacaaacagaaagccaaatcatgagtgaacgcccattcacaactgcttcaaagagaataaaatacctagaaatccaacttacacgggatgtgaaggaccttttcaaggagaactacaaaccactgctcaacgaaataaaagaggatacaaacaaatggaagaactttccatgctcatggataggaagaatcagtatcgtgaaaatggccatactgcccaaggtaatttatagattcagtgccatccccatcaagctaccaatgactttcttcacagaattggaaaaaactactttaaagttcatatggaaccaaaagagagcccacattgacaggacaatcctaagcaaaaagaacaaagctggaggcatgatgctacctgacttcaaactatactacaaggctacaataaccaaaacagcatggtactggtaccaaaacagagatacagaccaatggaacagaacagaggcctcataaataacaccacacatctacaaatatctgatctttgacaaacctgacaaaaacaagaaatggggaaaggatccctatttaataaattgttctgggaaaactggctagtcatatgtagaaagctgaaactggatcccttcctggcaccttatacaaaaattcactcaagatggattaaagacttacatgttagacctaaaaccataaaaaccctagaagaaaacctgggcaataccactcaggacataggcatgagcaaggactttatgactaaaacaccaaaagcaatggcaacaaaagccaaaatagacaaatgggatctaattaaactaaagagcttctgcacagcaaaagaaactaccatcagagtgaacaggcagcctacagaatgggagaaaagttttgcaatctacccatctgacaaagggctaatatccaaaatctacaaagaactcaaatttataagaagaaaacaaacaaccccatcaaaaagtgggcaaaggatatgaacagacatttctcaaaagaagacatttatgcagccaacagacacatgaaaaaatgttcattttcactgatcatcagagaaatgcaaatcaaaaccacaatgggatactatctcacaccaaagtcaggaaacaacagacgctggagaagatgtggagaaataggaatgcttttacacttttggtgggagtgtaaactagttcaaccattgtggaagagagtgtggcgattcctcaaggatctagagctagaaataccatttgacccagcaatcccattactgggtatatacccaaaggattataaatcatgctactataaagacacatgcacacgtatgtttattgcggcactattcacaatagcaaagacttggaaccaacccaaatgtccatcaatgatagactggattaagaaaatgtggcacatatacaccatggaatactatgcagccataaaaaaggatgatttcatgtcctttgcagggacatggatgaagctggaaactatcattctgagcaaactatcgcaaggacagaaaaccaaacaccgcatgttctcactcatgggtgggaattgaacaatgagaacattgggtcacagggtggggaacatcacacaccagggcctgtcgtggggtgggggcctggggaagggatagcattgggagaaattcctaatgtatatgaggggttgatgggtgcagcggcccagcatggcacatgtatacttatgtaaggagcctgcacgttgtgcacatgtaccctagaacttaaagtataatttttaaaaaaaggatcgagaattagagttacataagaggagtaagttcaagagatctactgtacagcatggtaactatagttaatgatgatatatcgtatttttggaaaatgcaaagagagtggacattgagttcacactacacaaatgacaattatgtgagataatgcatttgttaattggataaatttaactatttcacaatacttatacttcaaaacatcatgttgcacacaatacaataaatacatttttttgagataggtcttgctctgttgcccaggctggaatgcagtgctaccatcatggctcactgcagcctcgacctcccaggctcaagttatccccccacttaaaccctcaagtagctggaactacaggtgtatattcagttttttgtgcttttatttatttatttttgtgggtacatagtaggtgtatatattgatggagtgcatgagatgttttgatacaggcatgcaatgtgaaataagcacatcatggagaatggggtatccatcccctcaaacatttatcctttgagttgcaaacaatccaattacattctttaaattattttaaaatatacaattaagttattattgactacagtcgccctgtggtgctatcaagtagtaggtcttattcattctttctaacaatttttcgtacccattaaccatccccaccttccccccagtcctccactaccctttccagcctctggtaaccatcttctactctgtgtccatgagttcaattgttttgatttttagatcccacaaataagtaagaccatgcaatgtttgtctttctgtacctggcttatttcacttgacataatgatctcctaatttcttttttgagtccattcaattctagaacatctccttattttttaaactattttgtagacacaaggttttgtcatgttgcccaggctggtctcgaactcctgagctcaagtgatccacccacctctgcctcccaaagtgctgggattacagatgtgagccaccgcgcccagcatttttttttctttgtttttgtcttttatctcacctgggacccatgagattcatttttaaatactcaagttaaaaaggggagatggaggtggaagaagacatgaaacaagattgtttgtgtgttgaaaacctctgggtgatgtgtacatggatcctattttctctccttttttttttttttttttggacagagacttcctctgtcatccaggctgtcatgtcatccatggcacctggccactctatttttatagaactttgaaaattgccaggcatgatggctcatgcctgtaatcccagcactttgggaggccaaggcgggtggatcacctgaagtcggtagttcaagaccagcctgaccaacatggagaaaccccatctctactaaaaatacaaaattagccaggcgtggtggtgcatgcctgtaatcccaactactcaggaggctaaggcaggagactcgcttgaacccaggaagcagaggttgtggtgagccaagatcgtgccattgcactccagcctgggcaacaagagcgaaactccatctaaaaaaaaaaaaaaaatttcaaaattagccaggcatgatggtgcatgcctgtaatcccagctactcaggaggctggggcagaataattgcttgaacccaggaggccaagattgcagtgagccgagatcataccattgcactccagcctgggcaacaagagctaaactctatctcaaaaaaaaaaaaaaaaaaacttggtaataaaaaggttaagagaaatgaagaataaagaggatcagagaatggagcaggaattgaaggatgacatggggtcaagagaaggtctggcattctcatatacgtctcagggaaatgtaaattgataaaccacttggaagagctgtttggcagtacccactaaggctaaaatataccttatcctatggcccaacaataccaaaaataactgaatgcacagattacaaaacgccttgtatgagaatattcaggccaggcgcgatggctcacacctgtaatctaagcactttgggaggctgaggcgggcggatcacttgaggtcaggagttcgagaccagcctggccaacatggtgaaaccctgtctctgctaaaaaatacaaaaattagctgggcatggtggcatgaacctgcagtcccagctactcaggaggctgaggtgggagaatcactagaacccaagagggagaggccgcagtgagctgagatcatgccattgcactccagcctacacgacagagagaaagcctgtctcaaaaaataaaaataaaaaagaatgttcagagcagcttatagccaaaaactggaaacaaatcaaatgttcatcaacaggtgaatggataaagaaattatggtatattcatacagtgaaatacattagcaagactggcacagtggctcatgcctataatcccagcactttgggagactgacacaggcaaatcatttaaggtcaagagttcaggaccagcctgggcaacatagtgagactccatctctaaaaaaataaaaaacaggccgggcgcagtggctcacgtctgtaatcccagcactttgggaggcctaagcgggcagatcacgaggtcaggagattgagaccgtcctggctaacatggtgaaaccccgtctctattaaaaatacaaaaaattagccgggtgaggttgcaggcgcctgtattcccagctactcgggaggctgaggcaggagaatggcctgaacccaggaggcggagcttgcagtgagccgagatcgtgccactgcactccagcctgggcgacagagggagactccgtctcaaaaataaataaataaatgaataaataaataaataataaaaataaaaaacaaaaaaagtagctgggcatggtggtacaggcttatagtcccagctaattggggtgccaaagcaggaggatcacttgagctgaggaggtaaaagaaagagggaaggaaggaaggaaggaaggaaggaaggaaggaaggaaggaaggaaggaaggaaggaaggaaggaaggaaggggcaatacctaccattataccatttctggtgcgtgttttttaatagccatcctaatgaacacgaagttatatctcttgcttttgatttttatttccctagatggctagtgattttgaacatcttttcataaaagggtctttttaagatgggagaaatacagcttattggggttttttgtttgtttgttttgttttgttttttgagacagagtctccctctgttgcccaggctggagtgcagtggtgtgatctcggctcactgcgacctctgcctcccgggttcaagcaattctcctgcctcagcctcctgagtagctgggactacaggcacacaccaccatgccaagctatttttgtatttttagtagagtcggggttttaccatgttggccaggctggtcttgaactcctgatctctattgatctgcccatctcagcctcccaaagtgccgaattacaggcatgagccaccatgcccggccagcttattggctctttatgaaaaatattcaatagagagaagaaaacaaatcacacaggaaatgaaaacatgacacagccactttggaaaagagtttggaagtttcttataaatatacactcatcatagaacccagcagtcacactcacagatatatccagatacacgaaacatagatccccacaaagacatatgcatatatgccaagaataatacatattattcaaaatagccagaccttgggaacaatccacatttccatcaactggtgaaaagcaaattgtggcacatctatatgcggtgacatgctactctgcaatgaaaaggaatgagcttctgatgtatgtaacacatggttaactctcaaaagcattacgtatgcttcccagaagcaggcttggtatatggaagaaatgctgtagattttcttttcttttttttttttttgagacggagtctcgctctgtcgcccaggctggagtacagtggcatgatcttggctcactgccacctccgcctcccaggttcaagtgattctcctgcctcaggctcccgactagctgggattacaggcaccctccatcaagtccagctaatttttgtatttttcatagagagaggggttcaccacgttggccaggctggtctcaaattcctgacctcaggtgatccacccgcctcagcctcccaaaaagctaagattacaggcgtgagccaccatgcccagccgtagattttcatttatatgaaatgtagatcaatagtgggaagaaaaaactagaacagggctggatgcagtggctcaagcctgtaatcccagcactctgggaggctgaggcagaaggattgcttgagcccaggagttcgagatcagcctgggcaacatagggagacctctgcctctacaaaaaatttttaaattagccagttgtgatggcacaggcctctacttccagctactcaggaggctgaggccgggggatcatttgagccagggaggtcaaggttgcagtgaacaatgatcacaccactgcactccagcctgggggacagagcaagaccctgtctcaaaagaagagaaaaaaacctagaacaatggttgcccacaagagatggagcatggttgactaggaaggagtaggaaggagggttctcttttcattattattattactttagagaagggagtctctctttgtcacccaggctggagtgcaggggtgtgttcatagctcactgtagcctggaactcctgggtgcaagtgatcttccacctcagccccttgagtagctgggattacaagcgtgcaccaccacacttagctattgtttttttcttttttttagtagagacaggggtctcgcaatgttgcacagcctggtctcaaatttctggcctctagtgatccttccacctcagcctcctatagctaggattataggcacaaaccaccacgcccagctccaagagaactttcttggatgatgaaaatattctgtatcttcacagggatttcgataccttcaaaattcagcaaatgttcacttaccatgtgtgtatttcatcacaggtaaattttacctaaagaaatcgttaagggaaaactccatctacacaccttcacaggaactatgacacagtaaatagaatcaagtcctccagttggcgatggaatgggatctggcacaccagaagggggctcacctaagcctgacatgggacactgtgtggttctagcaggaaggaaggctgcatgtgccgtccagatgccagtgggcaagaggacaggatgatggaggatgcgcccgcttactgcccattgctgccattctctccgtgagataagaagcgggttcatcaacaaagagtgaggtgactgaagagggttttggagtttgaggaggcaggaacaaaaggataggaatagggcggggggagttccaagagaggacaatgagaggcgaggcatttttccaccacggagtgtgtttcagctttctgcaataccccagcggttctcaactgggttgatttttttcctcccaaggggacattcaatagtatctggagtcatgtttgtttgtaacaactggtagggaatgagtgggtgggttctgtcatctactgagtagaaaccaaggacactgctaaacatcctaccacacacaggatgcagcccccaccacccatgaaggcccaagacatcaacagcagtgagttgagaaattgcaatacatcccttccttgccccaagttccctctgtagcaggagagcaagtcagaataacagaactcaaagcctcttaaaaccccccttctcggccacacatggtggctcacgcctgtaatccccagaggcccaggtgggaggatcgcttgagcccaggagttggggaccagactgggtgacatagcatgctagatctcatctctactaaaaattttaaaaattagccaggtgtggtgatgcgtgcttgtagtcccagctacttgggaagctgaggcaggagaatcccttaagcccaggagatcgaggctgcaatgagctatgatcacaccactaaactccagtctgggtgacagagtgagaccctgtgtcaaaacaaactaactaactgcccttcccataaatcccagtttccccaatcaggtggtcccattaggcccatcttttttttctttttttttcttttttttgagtcaaagtttcactcttgttgcccaggctggagtgcaatggtacaatctcagctcactgcaacctccacctcccgggttcaagtgattctcctgcctcagcctcctgagtagctgggattataggcaagcaccaccacgcctggctaattttttttgtatttttagtagagacagggttttgccatgttggtcaggctgtctcaaactcctgacctcaggtgatccacccacctcggcctcccaaagtgctgggattacaggcatgagccaccacgcccagcctcattaggcccctcttaaccaagttctagggtgagggataagttgcttacagggttggcgtggatacagcactacaccctccccttaaaagtagggagtagacgccaagggaaactagagctatataatcccatcatcaagccttcagccctcttccaggacctgccccaaccggcctatccaggactgaaacaacagcatgggccccacctccaccccaccatatgcctgggacctagggtgtcaaattccccaggacctccaaacacttcctcctctgcccctctgagaacagcaatcctggtgcacacccacgaacctgtgggggtacccacacctccacctggcctcccagacccttgaccgcaggggctctccacccagcctagcccctggcaccagagccctggcccagctccaggttttgcattctgcccttgtgacctggccaggaggtgggtaactagggccagtttcttcttcttttttttttttttttttttttgagaccgagtctcaccctgttgcccaggctggagtgcagtggcatgttcttagctcactgcaacctccacctcccgggttcaagcgattctcctgccccagcctcccaagtagctcagactacaggcgtgagccaccatgcctggctaatttttgtattattagtagagacagggtttcaccatgttggccaggctggtcttgaactcctgacctcaggtgatccacccacctcggcctcccaaagtgctgggattacaggcgtgagccactgcgcctggcctactagggtgagtttctaaggcaggagctgagagtagacatggctagtagggtgctcaggagggcaggaggagggctgtttatgagccagtggtgggagagagtgtcattctagtctgagaggctttttccctgtggcttccagctctgcccttttcttaaacactccttcagcctcagcttggcttcagtcccaccaagtgcagtctgactcgtggagacatgagagatagagagagtgagagaccagagagatcaggagacagtgactgagagggacttacagggagatcagggagagaagcagagagaaggagaaagcccagagagcataagaaatgaagacccagagacaccaaaggagggagagacagagacacagagagacaaaaagattcagaggcagagactgtagaggcagaagcaaagcaagacacagagcatttcagagacccacggcaagagacagggaacagcatggagaactatgaaaaaataggcttccagagaaagagaaaactccagctctggagggaaagggacttagccagggccactcggcccatcagtggcagaaatggacttgaacccagagaaaaagaaacaagtgccccaaataccaaaggaacccagcccccatccctggcccatcattttgcgacagccccatgactaccccaaaaccaggcccaggctccaactggcaaagcaaaaaaaaaaaacaaagaaagaaagaaagctttgccccatcccaggagggcccccaggcgcagccccctcccacggcacctttccagctggctgtgagccctagggccgcaggaaaggtatggcaagatgatgggagggatttaaagttcacagcgagaacaagaaaagtggggttaaggaggagggtgtgggcagaaacaacttaagaacaacctctgccccaccaccccccaagcacacccagagctgcaggctctagcgcatcccagccagtgtctcctgcagctcagcaggtaaagggccccggtgagggaggcagagaaggagggggtgtctcccaagagagggtgggtcgccagctccaatctctgtctctgagactggctaggaatcttttttgctgtttcctctgagagctctcatgtccctgttctgagcactgggatttctttactggtgcttcaccaagtaggtggcttctctctctgcaatgcaaccccatggttggcaacacttgattttttcctgtcactgtttctgcctgtgcccttcctctctgtctccgtctctttctctctctctctctctctttttttttttttttttttttttgaggctggagtgcagtggttcaatctcagctcactgcaacctccacctcctgggttcaagcgattctcctgcctcagcctcctgagtagctgggattacaggtgcctaacaccacgcctgactaatttttgtgtttttagtagagacagggtttcaccatgttggccaggctggtctcaaactcctgacctcaagtgatccgcctgcctcggcctcccagagtgctgggattacaggcgtgagccaccgtgcccggcctcagtctctcttggtctgccctttgcagcctacccgtctctttgtgtggctctaatattccctgcctctcttattctctctctctctctctccatctctgtctatgtgactctgtctttgtgtatctgtttctgtctgtcattctcgtctccctcagtctctgtgtctagctctgtctctccctctctctgtccctcttaccctttttctctccatccttccatgtccctctctgtctctcagtcagtgtccatctcactgtctctccactcaatctcccttgtctttctctagctctgtgtctgtctagttctgtctctttctttctctagtctatgtcagcctctctctttctgtgatgtgctctctggctctccctatctctgtgtttgtctgtctctgtccctgtgtgtcttgatctctctttatcactgtctctgtatgacagtctcttgacagacaggtgatgatagatagataatagacagatgatacacagatgatagattatgaagatagtagatagatgatagatatagatagataatagatgatagataatagacagatcaatgatagatgatagaagaatagatagatgatggatagacagatgatagatgatagatagatagatagatgatagatagatgttgatagatgttagataatagatgagaaacaaagaaagaaagaaaaagaaaaaagaaagaaagaaaaagaaaggaaggaaggaaggaaagaaagagtgatagatgatagatggctgataggtagacagacatctgtagatatgtagatcgctcactgtttttctgtctctctcattatctttatgcatatctcttggcctctcttagtctctgttcctctatcacttgcctctctccatttatgtctctgtgtttctgtctccttatctgtctatatgttgactatctctgcctctttcctcctttctccctcccttccccatcccctggcctctccctgtctccttctctccatctgccttcatttccagggcctagggaaggtaagtcccaggggagatggaaaggagggatcagcgatgtcctctcccactttgccctccacacgccagcagctgccttcaccatggacagcataagcacagccatcttactcctgctcctggctctcgtctgtctgctcctgaccctaagctcaagagataagggaaagctgcctccgggacccagacccctctcaatcctgggaaacctgctgctgctttgctcccaagacatgctgacttctctcactaaggtgcaaggcccttagcttgggtgatggtggaaggataaggaggaggggtcccatggccacaggcccccctgtaacttctgtcttcctaccctcagctgagcaaggagtatggctccatgtacacagtgcacctgggacccaggcgggtggtggtcctcagcgggtaccaagctgtgaaggaggccctggtggaccagggagaggagtttagtggccgcggtgactaccctgcctttttcaactttaccaagggcaatggtaagcctcgtccttgtctcctccgctctcggccttttccatattgagggagggggtgagggtgagagactgttgtctcaatcttgttgacactcagggctgctgacatcactgatgacaccaaatgcaatgcagcgaggcagtgttggtctatggcaaattctctcccaccttcctcacctccagatcccaccactttcctgaattgtactcttgcaccactcctcatctccatccaaccccaaccccattgtcatcccaatccctagctctatcccaaccgcatcatcaactttccaactcagtcaagtggccccagttcccactgaccacctcaacccaatcccagtccccatcaacctttccccagtgttcaccacatcagccccaccttcatccctatccacaacactgacagcatctcaatccaaccttcattcccattatgaaccccatcccagtccccactttaaattctattatcaaccccatcctagtccctttagtcaaactgaattttttttttttatctgagatgagtcttgctctgtcacccaggccggagtgaagtggcacaatctcggcccactgcaacctctgcctcccaggctcatgcgattctcctgcctcagcctcctgagtagctgggactacaggtgcacactaccacacctggttaatgttttgtatttttagtagagatggggttttgccatgttggtcaggctggtctcaaactcctaacctcaggtgatccacctacctcggcatcccaacgtgctgggattacaggcaagagccactgctcctggcccaaactgaattctgctgctactttcccccaatcccagccccatctcctaacccaattacctattgaaatttccagttcccagttcttgctttcaatcttaaactcactaccatcaccaaaacaaccccatcacatatctacccaaccccaagttcaagctcagtcccaatctatcaatcctcctcatcctacccaactccatccacatcaccagcttcaaatacaatttatcatcaatcttataacccccttcattccccattgtcattcccaacctaacccaaactcaactccatcctcagccatccagcaattcatatcattcacttaaaacctcatctatgtcaatatcttgtccctctaaggcttggaatcaccctagtcctgtggtcttcaaactttatttatttatttatttatttatttatttatttttgagatggagtctcgttctgttgcccaggctggaaagcaatgacgcaatctcagctcactgcaatctccgcctcccaggttgatgccattctcctgcctcagcctcctgagtagctgggactacagacacctgccaccatgcccagctaatttttgtatttttagtagagactgggtttcaccatgttggccaggctggtcttgaatgcctgacctcatgatccagcagcctcagactcccaaagtgctgggattacaggtgtgagccactgcacccagccccaaactttatttcaaagacaaatctctgttcaaaggaagctatgtgacaagacccaataaatgatggaaggaaggagggaccaacagaaggaaggaggaagaaaggaaaaaggaaagaaggaaggaaaggaaggagggagggagggaaagaatgaaggaaggaaggaaggatggaaggaagccatcatgattggaaaggggatcctggagacctgcatcctggactattctctcctcacctccaaagaatgtctagggctctccctggctcctgcattagatgggtcccagctgccccaggatttgaaatcagagagctctggtacaatattacaatattacaatattgtgtattaggtacacgttccatccttcatgctcccttccctggcttgatctgatgaccttacctgtccaggtacaccagatgcaaagaggtggagacagggcacttgagaaagtcaccttgctacttttgcacagaaaacatctggatgggtacatcgtttgttaccaaaaatagccaccatctagttattcaatacacagcacagagggtaacagcagggttccaccactcactagctgtgtacccttgggccagaggcctcccttctcttcctcttagtttgctaccatgagaaaattataatagcattaactccatgttatgaggagtcaatgagacaatgcataaaaatgcaggcaatacactatagtcttttttctcttcttctttagtatctagttctctgctaggtccagaggaaccagagataaacacatctgagactttatcctatagtaggtcccagtccagtggaagacacaggcatcaccaaccagattgtgccatcccagagtggtccaggctgggatgggggaagcctggggagctatggaaaccctagagaaacacttggcccagcctagaagggaggaggagccagagaaggcttcctggaagaggggacctctaagctgaaacctaaagaatgaagatgagtattcaggagaaggcagggggtgaaagtgctctgggaaagaccagcctgtgcaaagattctgggtccaggaagagaagagacggggtctgttttgttcctggatgaattcccagtgtcctggtgcttatttttcttgcctatctctcttattcatgcatttaataatcaataagcaggccaggcacgatggctcacacctgtaatcccagcactttgggaggccgaggtgagtggatctcctgaggtcaggagtttggtaccagcctggccaacatggtgaaacctcatctctattaaaaatacaaaaattaggccaggcgcagtggctcatgcctgtaatcccagcactgtgggaggccaagacgggtggatcacgaggtcaggagatcgagaccatccttgccatgcctgtaatcccagctactggggaggctgaggcagaagaattgcttgaacccgggaggcggaggttgcagtaagctgagattgtgccactgcactccagcctggcaacagagcaagactccgtctctctctctctctctctctctctctctctctctctctctatatatatatatatatatatatatacacacacacacacacacacacacacacacacacacatatatattaggtgggcgtggtggtgcacacctgtaatcccagctagtcaggaggctgaggcaggagaatcacctgaacccgggaggcggagggtgcagcaagctgagatggtgtcactgcactccagcctgggtaacagagcgagactgtgtcgcaaaaaataataatcatcatcaataagtaatcaccagcacctcctgtgtgacaccctctgcactggacaatgctaaggacccagtggtgaccaagacaggcacccactctgccttcacagttctgtgaaggagacagccccatcaccagacagtaacagcccagagtgatcaggttcttaatggggaaacagaggcagagtgataggatggtcgtgagggaagcccatggtcctatggaagcttgaaggagacccctaagctggagggtccagaagggcttactggaaggagccagggagattccaaactctgtctctctcccagcaaataccatgaaaggggacctgggtggcagtggcctcaggatgagttcccggttaagctggtcccctcctcttctccccaggcatcgccttctccagtggggatcgatggaaggtcctgagacagttctctatccagattctacggaatttcgggatggggaagagaagcattgaggagcgaatcctagaggagggcagcttcctgctggcggagctgcggaaaactgaaggtcaggaattttttttaacaggctggatggcacgatcttttttttttttaacaggctggatggcagccttgacctcctgggcccaaaccatcctcccacctcaacctcccgaatagctggtacttcaggtgtgctccaccacacccagcttatttttaaattttttgtagagacagggtctcactatgttgcccaggccagtctcaaactcctgtgtgcaaatgatcctcttgcctctgcctcccagagtgctggaactataggcatacaccaccatgtctggccaggtctttgaatccagttcatccttataattcacatccattctacttttttttttttgagacagagtctcgctctgtcccccaggctggagtgcaatggtgtgatctcagctcattgcaacctccgcctcctgagttcaagcgattctgcttgctgactgctctgtcgcccaggctgggttgctgtgtactagcgtgtgttgtgtggcaggattatgtagctgtatgctggctttatgtgttggtgtgtggttaccgtgtcttgggatgtttccgggctggctgttaggtcactgcgtgtcgtgtgttggcatgtactgtgatcgtatttgctgggtgttctgttgccctgtgttgttgtgttccgtgatgcctgatgattgccttgtgctatgtcgcgtgctgtgtgttgtgttgccaagaatagcccgttctgtggttgggcgttgttgctgtcgatgtgctgcaggaagttgtgggttcggtgccgtctgtggcattgacagatgcttttggggtgtcgttaagcagcatgttgtgaccatgtccccgtgtttgcaccgtaagacacgttgccatggttgagtcggatgttgtacaaattaatggtgttgctgcatgaggtctggtgtgctgcacatcgcgtcttcctgatccattgcactccttaccctcaggcgagccctttgaccccacgtttgtgctgagtcgctcagtgtccaacattatctgttccgtgctcttcggcagccgcttcgactatgatgatgagcgtctgctcaccattatccgccttatcaatgacaacttccaaatcatgagcagcccctggggcgaggtcagccaactgagtccagcaggggcagggtgtggggtccgcaggatctaggaatggagaggaaacagtgggcggggaaagggctgtgaatggcccgcccagggcccgccccctcccatctgaccccacccagagttacacggccacgcccactcccctccactgagcatttatggccgccattgcctccttcccactccccctcagccccaacccccaccccggacctggctgccctttgagaccctgtccctgcctacctaatccacactgaccccattcgcccctgaacaccctttgtcctcctccaaaaccctcctactctgtctggtccccagttgtacgacatcttcccgagcctcctggactgggtgcctgggccgcaccaacgcatcttccagaacttcaagtgcctgagagacctcatcgcccacagcgtccacgaccaccaggcctcgctagaccccagatctccccgggacttcatccagtgcttcctcaccaagatggcagaggtaatccctacctggaaatcccacctctagtctgacctgaaattctcctgctgcccctgcctcaaacccacagggaccccagatggggcagggttgggggaccttctccctggagaagctgaagcatctggcccagctgggctggagccaggagccactcgcagccaccgccaacttacagctcattaagaagtcatcaaaggaggtggggcagggtggagggggcagttgctcaggcttgttatcccagcactttggaaggccgaggcaggaggatcgcttgagtccaggagttcgagaccagcctggacaatatagtaagacccagtctctacaacacatacgtacacacatacatacacacacacatacatacatacatacacacacacatacacacatacatacatacatcatacatacatacacacatacatacatacacacatacatacataaaacgtattttttaaaaaaacaagaagtcattcaagctctatccaagaagttaattgtaggccctgcagctgagattttccctgccctgcccttctccgttccccagctctcccagggaaagaaagttaaacccagctgggaccgaatgggcccccagcagcagttgtactggtctagagtgaaggggcctccattcctggctcacatccccacccctctaccaatgcaggagaaggaggacccactgagccacttccacatggataccctgctgatgaccacacataacctgctctttggcggcaccaagacggtgagcaccacgctgcaccacgccttcctggcactcatgaagtacccaaaagttcaaggtgaggcccacccacacagcagcgtggaggtgcccatgtgttccagcctcaccccagagcagggagccacggccccgcctcccaggtctgatatagcctcctgctggcaccaggattccacagccaaacccacaaacccacacggaggccgatcccaccacatggcccatgaggtccatgcagcctgcccgaatcccgacccagatcccacccgcttaattgttggtttttttgtctttgttttgttttttggagacggagtctggctctgtcacccaggctggagtgcagtggcgtgatctcgatccgctcactgcaacctccccctcccgagttcaagggattctcctgcctcagcctcccaagtagctgggattacagcctcccaagtagctgggattacaccaccacatccagctaatttttctatttttagtagagacagggtttcaccaagttggccaggctggtctcaaactcctggcctcaagtgatccacctgcctcagcctcccaaagtgctgggattacaggcgtgagccactacacccagctctgcttagttttttgtttgtttttgagacagactcactctgtcgcccaggctggagtacagtgccgtaattacagctcactgcagccccttgggctcaagcaatctccccacctccgccttatcaatagctgggagtacaggcgtgcaccaccacactcaatacactcagctaattttttattttttgtagagacagggtctcgctgtgttgccctggctggtccccaactcctgggctcaagcaatcctctcaccttggcctcccaaagtgctggggttacaggtgtgagccaccgctcctgcctccacccgcttagtcttgctttgtgccgagtgcgtcaaccaccacatgcgtccacctccggcttcagagccctgccctggagccccagccatgtgcctgccagggaaccctacctctcccatgcagcctggcccacacacacagctctgtctgctgctccacctccccaagctccatctctgggtgtatcccctgctctgcccctgatctccagccctcccacacagtccacccactcgacctaccgtccagccagtagagccccaaaactgctcctgaaatcccatcaggtcctggattccaggcctccctgaagccctgcccacacaacccaacactcaggcccttgcacaagccaagctttcgccctcactgacccacttcctcccagaccctggctaattcttttttttttttcctcttccccccccccttttttttttttttttttttttttttgagacggaatcttgctctgtcacccaggctgaagtgcagtggcctgatcccagctcactgcaacctcctcctcctgggttcaagtgattctcctgcctcagcctcccaagcagctgggaccacaggtgtgcgccaccaagcccagctaatttttctattttgttgtggagattgggtttcaccatgttgcccagatggtctcaaactcctgggctcaagcgatccgtccgcctgggcctcccaagtgctgggattacaggcgtgagccaccgcgcccggccagctctagctaattctcacgtgcgccccagcagtggcgccccgcgctgggagactttgactagacgcctccccacacacgcacacacctcttatcagcctggttgccctgtcgcgcccgctgataccctcgaccccgcttcccgcttcctctccagcccgcgtgcaggaggagatcgacctcgtggtgggacgcgcgcggctgccggcgctgaaggaccgcgcggccatgccttacacagacgcggtgatccacgaggtgcagcgctttgcagacatcatccccatgaacttgccgcaccgcgtcactagggacacggcctttcgcggcttcctgatacccaaggtgcgctaggcctggcaaacgacatcaggcaacctaagaggaggcatcgcaggctcttgcactggcaaggagtatcccaggcactagccatgaacaccccaggccttagcaactggcatcccaagccctagctacagacatctcagacccttaaatccagaagctcaggcctttgccaggaccccatctcatatcatagtggactagaccccttcaccatgacaaatccccttcctagaacccctccctggaagccctggggtctggaacttcatctggaggatcccctgggcctaaacgctattctcagggacccctccttttccccagaaaccccacatctgttcccacaaaggttgggggtttcccacatccctgccaaagtccccaataatacagcatatagcacccatcacttggaaccctagacacccacacatatttccttggcccccgattgagtcctatacccacctatacccaccccttatcaagtccccaggacacccagcccaatacaatggaaaggagtttgggagcctcccagccctcctacactgctaagtccacctcctcacccacacagggcaccgatgtcatcaccctccttaacaccgtccactacgaccccagccagttcctgacgccccaggagttcaaccccgagcattttttggatgccaatcagtccttcaagaagagtccagccttcatgcccttctcagctggtgagggcaggaatcagagtctttctggcccaatttctacctacattcctcaccctaattccacttgccaaatcctctcactccttccttccacccattctcagctttggatgcacagagacattcattcctcctctcaactctgctcctataggcaagtagtgactaaaatcctcgtgaagcaaggtggggaggttgattaataatttaacttgggactgggcatggtgactcacacctgtaatcccagcactttgggaggctgaggtgggtggatcgcctgaggtcaggagttcgagaccagcctgaccaatatggtgaaaccctgtctctacttaaaatacaaaaattagctgggtgtggtggtgggcgcatgtagtccccgctactctggaggctgagacaggaaaatcacttgaacccaggaggcggaggttgcagtgagccgagattgcaccattgtacagagagagactctgtctcaaaaaaaataatgataataatttaacagccaggggcagttgctcacacctgtaatcccagcactttgggagatctaggcgggcagattacctgaagtcaggagttcaagattagcctgaccaacatggtgaaaccctgtctctactaaaaatacaaaattagccaggaatggtggcacatgtttgtaatcccagctactctggaggctgaggcaggagaatcacttgaacccgggaggcggaggttgcagtgagccaagatcatgtcattgcactccagcctgggcaacaagaacaaaactccatctcaaaaaatgaataaataataattataataattattatttaacttgggccaggcacattggctcacacctgtaatcccatcactttgggaggctgaggcgggaggatcgcttgaggccaggagttcaagaccagcctggacaacatggcaagaccctttctctactgaaaatgttaaaattacctagatgtggtgtggtgtgcatctgtggtcccagctacttgggaggctgaggtgggatgatcacttgagctcaggagtttgaggttacagtgagtatgatcatgccactgcactccagtctgggcaacagagcgagatcctttctctaaaataaaaaatactgactagccaaaaataaaaaatatataaaaattttaaaagaaaaaaaaattgaacttgggagtggtcattgtttacctctccactgggtggcgcagttgaggtggttctaggggtttttgttttgtttgtttgttttttggctttcctctttaccctgctgaaaaactccctctttactcagtggcaggaaaagaaaaaacaaaaaactggcataataataggtaacttaccatattgcctactgtgcgtcaagtgctgcctctacaagagcccagctaagagcttatgttttcctctgggaatgtgtggcccagattccagcagggtttgcatcccatctgtcaccccctagctgtgttgccttgggtatgttactccacttctctgtgcctcaatgtccacatctataaaatggagataatactaaggcctgcctcttggagttgttagaattaattgcgatgtaatgctcagagtaatgcatggcccatggtaagctacttacagcctcactgctttccctgtgtttaccattcacagcagcctcatgaggcactattactatccctccttttatttttctttctgagacagggtcttgctgtcacccaggctagagggcagtggcacgatcatggctcactgcagccttgatctcctgggctcaagtgatcccctcgcctcagcctcccaagcagctgggactgcaggcatgtgccaccttgcacatttttaaaattttttttgtagagatgggatcttgctgtgttgcccaggctgctctcaaactcctgggctcaagggatcctcttccctcggcctccgaaaatgctgggattacaggcctaagccagcacgcccagccttcatatccccattttaaatatccagaacgtgtggtttgtccaggatcacaaaactagtagtgacagggccaggattcgaacccaagcagcccaggtcattccactccacagtttaaagcatctttcccagttctttacatgggtgaatctgtgacgtccccagctgctgtcttcctttcctcttatgttttcctctgggaatgtggggttgcagcctctaacctcatcttatctcaccgccgctccccatcctgccacccctgcagggcgccgtctgtgcctgggagagtcgctggcgcgcatggagctctttctgtacctcaccgccatcctgcagagcttttcgctgcagccgctgggtgcgcccgaggacatcgacctgaccccactcagctcaggtcttggcaatttgccgcggcctttccagctgtgcctgcgcccgcgctaacgccccggcccttccagattcgcctgtgagcgatgaggcccgcccatgcgggttgctacgtccccttcttggtccacagtctgccctcatccctctggcagtcacgctgtcttccctgcatgctgtgcctgccgcgtgcccttcccccatccctccaatctgtgccccgtctgcagggcagaggcagatgtggcatgtctttttgtacccacagagcttgttctatggcacgcccttttctaggctttttgtatcatttcttagtacattgtaatagattcaaaccagtcttggctgaattaaagtgagaatgagagtcatttaggatggggagaagggagctggctgcagagatggagacactggctagttttgccctcacctttagggtggctagggtgggacaaattgtatcctggagacaggcttgaaggtaaaggctgcgaggacctgaagccagagaggcagagaaaccaagacagagaaaaaggcagcaggaccaggtgaggtggctcacacctgtaatcccagcactttgggaggctgaggcgggaggatcgcttgaacccaggagtttgagaccggcctggcaacagagtgaggcctgactctacaaaaagtcaaaaagtggggcaggaggattgcttgatcctgggaggtcgaggctgcaatggggtatcattgcgccactgcattcccgcctgggagacgggagtgagaccctgtcagaagaagaaagaaaaaagaagaaggagagggagagggagagggaggagggggaggagggagaggagaggaagaagaagaagaagaggaggagaaggaagaaggagacagcagcgagatatcagagagaatatgcaagagatgaagggcactgcagagagatggaagcagggcaaagtgaggctaaggaacaagcactgacactaaatgacactccctatttgcacgctgttctgaatgcctcattaagtctccctatgaggcaaagccatgttttttgctttggtttgatttgggaggttttttttctttctttctttctttcttttttcgagacagagactcgctctgttgcccaggctggagtgcggtggcgcgatcttggctcactgaaacctctgcctccctggttcaagtgattctcctgcctcagcctcctgagtagctggaactacgggcatgtgccaccactcccgattaattttttgtatttttagtagagacagggttttactgtgttagataggatggtctcaatctcctgacctcgtgatccgcccacctcggcatcccaaagtgctgggattacaggtgtgagccactgtgcctggcctgtttgtttcttttataggcagggtctccctctgttgcctaggctggagtgcaatggcacaattcaaggctcactgcaaccttgaacttctgggttcagctgatcctcctgcttctgtttcagaccaccaaatagctgggactacaatcaccgtgcctggctaattttttttttttttttaatctttagtagagacagagtcttgcagtgttgcctaggctggtcttgaactcccgaactaaggcgatcctcccacccaaaaagcactgggattacaggcatgagccaccacacctggccacaaagcagtattattatcatgtttttacagatgagcaaactgaggctcagagaggtgaagtgagttgcccaaggtcacacagaaacaggcagagctgggatctaaattcagactctgaggctacagacactgcacttcttttcttttttcttcttctttcttttttttttttttttttcttccaagagaagctgtcactctgtctctcaggctgggatgcaatggcataatcacagctcactgcaatttcaacctcccaggctgaagagatccttccactttagctttctgagtagttgggactacaggctgcaccacaaccacacctggttaatttgtttttatttttattttttgagttattttttgagacagagtcttgctctgtcacccaggctggagtgcagtggctcaatctcagctcactgcaacctccacctcctaggttcaggcaatttttgtgcctcagcctcctgagcagctgggattacaggtgcccgccaccacacccagctaccttttttttttttttttttttttgtatttttagtagagacagggtttcaccatgttggccaggctggtctcgaactcttgggctcaggagatccacccgcctcagcttcccaaagtgctgggattatgggcgtaagccactgcacccagctgctaatttttttatttttaatttttgtagaggcagtctcactatgttgcccaggctcgtctcgaactcctggcctcaagtgatcctctagcctcagcctcccaaagttctggacaacccgtgcacaccaccatgccctactcagacactgcacttctaactactaccttttaattcacaagtcagagacccagaaagaaagaggcagacacccttaaatacagagaagagcagagaaacacagacactaagatatgggaggcagggggaatcgagagagagaatggaaagaaacagagaaatgaccagagaaagacagatgagcaatgacagtgggagttccgaggactgaggctccctccctcaatccccagcccctcttttcttttttttcttttttcttttcttttttttttttttggacagaatcttgctctgttgcccaggctggagtgcagtggcatgatctcagctcactgcaacctccacctccagggctcaagtgattctcatgcctcagcctctcgagtagctgggattacaggcacgtaccactatgcccagctaatttttgtatttttagtagagatggggtttcaccatgttggccaggctcgtctcgaactactggcctcaagtgatctgcccacctcagcctcccaaagtgctgggattacaggcatgaaccactgcactaggccctcccaccctctcactgaaattctctgaaattctcccgtttggagtgacgatagcaaccccaggcatgtaccctcccaacctgggacccgacctaataccctaacatcctgctgacagtggctgtttttgcggggcaggcgtcccaaagcacatcaagccagattcaagcagagtggaactggcccctcagccatcagtggaggtggcctgagaggctctaccctaaacggggtctccccaaggcgatgcagaaactgggacatgctctgctgagcatggggcttactggagtgaggcttataggcagtccccacatggggattaaggtgtcagctctttaatcccctcactgttcccatcacaggctgaccagagtcggccccagggcccagccagggacacagaggttgggggagagagggagacacagagagactcagaggtcctgagaaagacaggcagagagagatgatgcagaaaaacacctggagacactgaaaagagatggagaggaaaaggaagagacagataacgcagggatggcagagaaatcctggaaaacagagaccgggaggagaaagacagccactgagaaaagggaaagacagcgatgtccagagagaggaaagacaaagataaataaagagaacagaaatgaagagagatagagagacctgagagaaaaagaaaaagggaggaaaagaaagagagaaacagagaaatccagtctaattacaaagagatagaaacaccaaggcgggaggatcacttgagcccaggagtttgagaccagcctgggcaacataacgagacctggtctctataaatattttaaaaattagctaggcatggtggcacgcacctctagtcccagctacttgggaggctcaggtgggaggatcacttgagcccaggcagtcatggctgcagtgagctgtgatggtgccactgcactccagcctgggcaacagaacaagacagatggaagggaagggaagagaagagagaagaagaaagggaaaagaggggaggggagggaagaaagaggctgggcacggtggctcacgactgtgatcctagcactttaggaggctgaggcaggaggattgcttgagaccaagagttgaagaccaacctggccaacttaacaagaccccatctctataaaaaaacaaagagaggtagggaggaagaaaaattgggcattcattcaacaaacatttactaagtgcctactgctgtgctgagcgctattttaagtgctgggatacagaagcaaacaagacaaaatccttgctctggaagagctgacattccagaggacagcccacccgagcaaaatggaggaagagtcaggagctggggagaaaccagaggccataataaagaggatccattaaagcctgtcacagagggtggggtagggctgggggaggatgcagcttactgtgccccaccacactcccgctgtcagtggagtcagcagctctgagcaggggccctgccagacaacccatgtcagtcaccaggttccagaaaggctgacaggtaggaagacccaggacagggcaggacagaatatggaggtacaagggggtcaacatgcagaaaggcaccctgaagaaataaggagaggcacagaagtgccaggctgagacaaagggaagcacagactgggggagatacagggagaggaagacacagacatactgaaaagagagacagaaaacagacacaaacagaggcagagactgagagaaaggagagagagatgggaaaagatggaaagaggagagagagagagatgaacacagaaacatagagactgagcgtgagggaggctgggcacgctggttcatgcctatactcccagcactttgggagaccaaggcagaaagattgcttgagcccaggagttggagaccagcctgggaaacacagtgagaccctgtctcttcaaaaaatacaaaaattggcaggatgtggtggtgtgtacctgtggtcccagctactcgggaggctgaggtgggaggattgtttgatcccaggttgaggctgcagtgagccatgatcataccactgcactccagcctgggggacagaagccagactctgtctcaaaaaaagaaagaaaagaaaagaaggaaggaaaagaaagaaaagagagagagagcaagtgagactgagagatgaaacaaagagacacagagagaccctcccagagacaatgccagtcctaggctctgcacagtccccccccccccgcccactggctcgccaggtctgggccctgtgccaggcacttggaggaaggctggatttggccaagcaggggcaggcaggagggtggaccacattcctgaacagtctgttccaaatacagccccaacctcactcactgctgccaccaccgcaaccctggcccatccaggcctgagtctgccccctctagcccatgccctaggattgggggtagtgggggatagatgagagaataagggataagtttgtctgccatcatggcctggcctcagacaaggacttgggggactggataccagggggttcagcagcatgggcacagaacatttgggggcatctgggagccaatgccttgggaatagagatggtagattcagggcaggacataatatggaagtacaagggggtcaacatgcagaaagacaccctgaagaaatagaggcacagaagtgccaggctgatggacacccagaagccagggaaattgaaggcagatctggggaacaagcgtagcacacagggtcccaagagcaatggaagtgacaagggctcaggtgtgagctcctaggaatcacaggcacagagcacaggagtgccaggggtgtctttagaagtgtatttgagccaggagcagtggctcacacctgtaatcccagcactttgggaggccgaggcaggcggatcacctgaagtcatgagttcaaaatctgcctggccaacatggtgaaactccgtctctactaaaaatacaaaaattagcagggcctggtggtgcacgcctgtaatcgcagccacttgggaggctgaggcaggagaatcttgaacctggtaggcggaggttgcagtgagccgagatcgcaccactgcactccagcctgggcgacaagagcgaaactctgaaaaaaaaaagaaggagaagaaggagaagaagaaggaagaagaagaagaagaagtgtatttgagagtcggtgtgtatttaggaatcagaggtacagggtacagcgttcagggggcccagagatggcccggagattgaggaatacacacctacaggccaaataaattggactcaaaggtgctaggggctcaggagggtgcacctgttggccaggtgtgttgacatgaaaatgctggtgtacgaaagatgttaagtggggcaggctgaggcaggcacaaaaaaaaaagccaggaggagccagggcacagttccaccagggctgggggtgggctggagacgtcgggctggggaatccatggaatgagcagccctgagatgcccactcctcccacatcgggtctctgcccctgctccacccaagaccccttggaaatcaaatagaggtgcaggcgtggagaattgcaggcatgatgatcgcgggtatcgctgcgctgctgttgtggcttctggtgctggtgccggcgtggtgggggtagggtgggtgccgcgctcagatgcgggggtccctacctccccggcccaggctgctcccattgctggggaacttgcagctgcagtccggaggcctggaccgcgcgctccattcccgacaggaatgggggaacggaattctggattcgtggaggtggggctggggactagaactcctcctgaacgaagacagctgagggcttgtactctatgatcttgaggaaggacaggaaggatgagtgctccggactgctgagtactaggaaaggagaatagggagtggagagcctggggccgggacactgggtcgtaaggaaggagcccagagcaggaaatcaggttgtgggaagaggggagcagggggtctgttctcctggttcagggtggggaggtactgagggcccaggagacactctgagggtacaggaggttgggaatctggacttctaggtcccaagggaagaaggaagtgggggcctggactcccgcatctcagggaggaaggagctggggatctgaattcctggacctgaggaatgagggtctgagacgaggactcctgggtctgaaggaagagggagctgggggcaatggctccgatgaggaaccctatgggcacccgctgagcaccggctacccgtagctctccggccgctggggccgggtgttcacagtgcggctgggcccgcgccctgcggtggtgctgtgcggctacgcagcgctgcgggacgcgttagtgctacaggcggatgcggtctccggccgcgggtccatggcagtcttcgaacgcttcacacgcggaaacagtgaggccccggcgctggacttgccggtccggacgctccaggctgggcgggtaaatggtagaggcgggcaaatgggggcggggcctaatagagactccagctaatgaggtgcaaacggccgagagagggcggggcggcgctaaagcgtaaggttagaatggaggttcatcctgcagccaacaggagaaaagagcctaagattcaaagtcccagagccagcctaggtcagggatggagcccagcaaaggcggggccaatgtgtggatagggcacttggaggtctggtaaggcagcaaaacgaacgaagccggccgcaggagtcggaggccccgaaagggatgtagccagtgacccggcgcttcctggatggggcgtggccggttcccgggcccgcctcctttcccgtccccaccacaggaatcttgttttctaaccggccgtgctggtggacactgcgcaattttgcacttggagcgccgaagaagttcgggttggatacgcggaccatcgaggcgcgtgtcctggatgaggcggcttgtctgctagacgaatttcaagccaccattgcttcggcctggccgggagagcggaagggcctggtgtgggagagtcccttgcactgccaagacggggccactggaaggtatttgggtggaagaaagccagtaagcccatggggctggctgggggcaggaccacgcgttatgaccaccgtcctgttcctacccccaggagccccgtttgaccccgtgcggctactgggtaatgctgtatccagtgttacctgttcttgtcttcgggaaccgctatggctacggggacccggagttcctgaggtcctgaacctcctaagtgacaacttccgcatcatgagttccaaatggggcgaggtgagagggccggccacaatctctcccttgtgcgtccagccttatgccaaatcccgagtacacagacgtacctacaatgggacagttagattcttggaagagttctagaacctccaatatcaaagtccctgtagggaaactaaggcctagtgggcatgtccagggcccttgttgagaccctgtctctccagatgtacatttgcctgtctctcatggactggctcccgggcccgcaccaccaaatcttccaaaacttttcagagctgcaggtcttcatctctgagcaaatccaacaacactggcacatgaggcagccggcggagccccgcgatttcatcgattgcttggccagatgggtaaggcatgggtcccagctccctaaactctatccatgccgcccaccaacaggtgcctggcgcgcggcagcccatcttctctgcccacagaaacagcaagacccagagagccatttccaggaggagacgttggtaatgacgatgcaacttttttttttttttttttttggtggcacagaaaccacgagcaccaccctgtgctccatatgggctcctcattctgcttaagtacccagaggtggcaggtctgcgagccagagagacccagaatgggaggctgcggtttggagatggctggagggtcccggaagtgcacagcctccctctgccccagccaaggggcaggagctggaccctgtggtagggcagaggcctgtcccaagcccggacgaccacgtgcaatggccctacaccaacgcagtgctgctggagatccagcgcttcatcagcgtggtgccgcgcaccctcaccctcgacacccacctgcacagccactgtctggccaaaggtgcccactgagtctggagatcctgtgtggggccccgatgcatgagcgtattccgagatcagccagaatcggcaggtgtgcgctgtgcagacccaaacacaatcagttacccctggagcaggaaagtagacctgccttcccttcagcatttttttttttttttgagatggcatgatctcggctcactgcaacctccacctccccaatacaagtaattctcctgcctcagcctccctagtagctgggataacaggcacccaccaccacgcctgtctaatttttgtatttttagtagagacggggtttcaccatgttggccaggctggtctcaaactcctgacctcaagtgatccatccttctcggcctcccagagtgctgggattacaggcgtgagctacccacccagcctattcccttgggcttttaaaaagccatttcggccaggctggtcctgaactcctgccctcatgtcggccaggctggtcctgatcttcccacctcggtctcccaaagtgctgggattacaggtgtgagccaccgtccatggcccatgatgttgttttgaagactcagtgaggacatgtgtgtactagacttggcacacaagagttggtcaaatacatttactgctccccacccttctaataaaccaaatgcagctgtgggatagtagggggaggcactgggatagctaagcagggaggggatcctggggctccagggatgggcagagactcagatgctcagatctggtatggagccccatgactgaaccccactgagattttgggttctttaatacaacagtgaacctttcaatgaccatgaaggtgtctcagcctcctgagtagctgggattacaggcgcatgccaccatgcctagctaatttttgtatttttagtagagacggggtttcaccatgttggccaggctggtctcgaactcctgacctcaagcaatccacccgcctcggcctcccaaagtgctgggattacaggcatgaaccaccacacctggccaagactccaactcttaaacaaacaaaaagacactcatattggattcaagcccagctaatgacctcatcttagcttgatcatctgcaaagaccctttccccaaataatatcacattcacaggtcctggggttgaagatttcaatatcttttgggagcacaaaattcaaagtataacaatgatggagatgtagagaaatggacatgttccaaagacatttaggaggcaaaatcaatgactcagggatgggttgcttatggccagttggggaaagaaatgtgttgagcatgaacctggaacaatggaacagatggaaattttcttagtagagatggggtttcaccatcttggctaggctggtctcaaactcctgacctcaagtgatcagcctgcctcagcctcccaaagtgctgggattacaggcatgagccaaacactcctggcctcagatggaaaatttccaaacacacacagggctgggggctgctgtggtcttgccaactgctccaggcatgcatgttgggggccacagcatccctgtccgtggggatgtcatccagaacagtccctgcccctggaaaggtggaaactgcaagaggcacccccattacagactgaatccaggaaccttacaacgaatatttgaaacttaaaaatagagactcttagcgctgtgggatcataaacttatagaataataatggttaacatttacagagcccatctagatctgagcattgcactgtgcaatttacatttatgaccttatttaaccctcccattgccttccaagtcagagatccccattctctaaataaggaatagctcagagggagaatggtctctgggatctccagggttagaaagtgacagatttgggccaagcacagtgctcatgcctgtaatcccagcactttgggaagccgaggcgggcagatcacttgaggccaggagttcaagaccagcctggccaacatggtgaaaccccgtctctactaaaaatacaaaaattagccaggcatggtggcgcacgcctgtagtctcagctactcaggaggctgaggtgggagaatcgctgaaacctgggagacagaggtggcagtgagccgagatcatgccactgtactccagcctgggtgacagagcaagactctgtctcaaaaaaaaaaaaaaagtgacagatttggattcaaccctaggtctgcccatctccaaaacccttaagcaatagctttccttgcactttcaacaacagtcacagcaagaatgctctcattacaggccaggcatggtggctcacacctgtaatcccagcactttgggaggctgaggcaggcagatcacttgaggtcaggagttcgagatcagcctggccaacatggtaagaacggtctttactaaaaatgcaaaaattagccaggtgtggtggcgtgtgcctataatcccagctactcgagaagctaagggacgagaatcacttgaacccaggaggtgggggttgcagtgagccgagattgtgccactgcactccagcctgggcaacagagtgagactccatctcaaacaaaaaaaaaagctctcattacagagcctgctgtgagccggaactacctaaatatttgacaggcattgtacagcttggcccccatttcgcagatgaagaaaccgaggctcagagatgctaagccattttcccaaagtcaccagcaagtagaatgcccaaggtgtggcttgaatccaagactgttgtctctctccaaagtccacctcagagcagtggaagggaccacctcacctaccctgacacttgaagatgaaagaagtgtggaccacagaaggaaagacctcatgcaagatccacagcaaaccatggccaagggaactgggatggcaatggggaagaagtagagctcttgcatcagagccctgtatctgagccaagggtggtggctcatgcctgtaatcccagcactttggaaggctgaggcgggcggatcacgaggtcaggtatttgagaccagcctggccaacatggtgaaaccctgtctctactaaaaatacaaaaattagctgggcatgatggtgtgtgcctgtaatcccagctactcaggaggctgaggcaggagaatcgcttgagtttgggaggtggaggttgcagtgagccaagatcaggccatcgcactccagcctgggcaacagagcaagaaaaaaaacagccctgtatctgtagacatttctctgtgtatctctctcacacccttcttgagaaggacataaaatctgtggacaaagcaggtgtgggcccttaatctcccaaggaattcttctgaactttctttgagacagaatctcactctatcacccaggctggagtgcaatggagccatctcggctcactgcaacctccaccttctgggttccagtggttctcctgcctcagcctcctgagtagctaggattacaggcatgcgcgacacctggctaatttttgtatttttagtagagatggggtttcgccatgttggccaggctggtctggaactcctgacctcacgtgatctgcctgcctcggcctcccaaagtgctgggattacaagtgtgagccaccgtgccccacccacagggttgttttgaagacttagtgaggacatgtgtgtcctagacctggtacacaagagttggtcaaatacatttactgctccccacccttctaataaaccaaatgcagcactgggatgtcggggggaggcacagggatagctgagcaaggaggggatcctggggctccagaggcaggcgggggactcagatgctcagatctgatatggagccccatgactgtgaaccccactgaggttttgggttctttaatacaatagttaacccttccttgactatgacacccaggagccatcctagcctagcccttggactccatctggtgccagaatggcccagggcttggatatctcaaaatatcagctgacaacaggtcagtaaatattctgagaaaatgaaaaatggacaacctgaaccccaagccttgcttccgcctgaacgctgacccagacttcggtcacattctgagaccagattcctggtcactcagtgagcactggacctggaccacccatccaagctactgactccacgctgatcctggccacagcgtgagccatgaaaggcacctcagggagaaggaacagcaagaggaaagggcaggaggcttggaactgtgttgtgtttggctagaggtaacaagagaaaaagtttagcccagagggtccatcggggaaaattttgggacatggaccatgagaggtcctttggattcttagaaatatctctgaatgtcccaccaaggagttttgactttttcctagggcctttggaaccacaggagatttaaagtaggggaagtcacaatcaaatctgtgctgtagaaaaatcactctgaaaccagacacggtggctaatgcctgtaatcccagcctgggtgacatagcgagaccacgtctctacaaaaaataagaaaattagctaggggtggtagcatgagcctgtagccccggctactcaggagactaaggcaggaggatcgcttgagcccaggagttcgaagctgtagtgagctgtgattgcaccactgcactccagcctgattgacagagcgagaccctgtcaaagaaaaaagaaagaaaggaaaaggaaggaaagaaggaaggaaggaagggagggagggagggagggagggacagagggaatctctggaccttgaggggaatccacagaactggatctgctgacagatgttggctaagttaccaatggctcatgggaacaaggatatctatcaggacatctacaggaaaacagcctgaaaaatgtccatattaattaaggtaaagaccaggttgttgtaaccaacagatcccaaaatgcaatcattcaaataaaatacaagtttctttctttcttttgtgtccctcttgaagtagacagttagtccagcactgcaaggtggttcccctccttgtggtcaatcatggacccagattccttcaaactcgttgctctgctatagttcagtggttctcaaagtgcagcctccagacctgcagcatcagcatcaccttggaactttttttttttttttttttagacagacagggtcttgctctgtcacccaggctggaatgcagttatgcgatatcagctcactccagcctcaacctcctgcacccaagcaatcctactgccttagcctcccaagtagccaggactataggcatgcaccacacacccagctatctgaaacttgctaaaaactcaaattcttaaaccccaccccagacctactgaatcagaaacccaaaacctgtgttttaacaaggcctgcaggcaattctgaggcatgttctcagcagagcatcactaccctacagtattatcatgatcttcatggtcaaagagcagaaggttttgtacagcttttccccccttttttcttttctttttttttttttttttttttttttttgagatgcaatttcactcttgttgcccaggctggagtgcaatggcacaatctcagctcactgcaacctccacctcccaggttcaagcaattctcgtctcagcctccggagtagctgggattacaggcatgcaccaccacacccggctaggttgtatttttagtagagatggggtttctccatgttggtcaggctggtctcaaactcctgacctcaggtgatcctcctgcctcggcctcccaaattgctgggattacaggcatgagccaccaagtctggcccccttttttcttttctttccttttctttctttttctttcttttttttttttttttgagatggaatctcactctgtcacccaggctggagtgcagtggcatgatctcagctcactgcaatgtccacctccccaatacaagtaattctcctgcctcagcctcccgagtagctgggattacaggtgcacaccaccacgcccagctaatttttgcatttttcatagaaatggggtttcgccatgttggccaggctggtcttgaactcctgacctcagatgatccacacacctcggcctcccaaagtgctgggattacaggcgtgagccactgcacctggctggttttctacttcttgagtcatccactccagtacagaagatggaagggatggaagacctctggctgttcaaagacctcggacccagaagaaacttgaattttgggcacacaacatgggttacgagggtgagggagtccagtctagcataatggtgagtaagatgggtcctggagacaggctaccttattttaaatcccaaatgtgtgactttccacaagtaacatctccttgagcctcagttccctcttccataacaggggaatcatgacagtattatctgtctcatggtgttgctatgagaattcatggtgttatgtccctgacacgtaacaagccctcaagtgttagtttaatattagtcttaacattttaaggttgataggagtgtctttttgtgccaagccttgcgttaaaggattttctacagtatcacattgaatcctcatggtgtatccatcatgattgctgtatgttatacagagataggttttgttaaaatactcattttataaaggaggaaactgaagggcagactggtgaagtcatttatatatatcaaaggaaatatagattgtaggtgctggaactggaattctaactcaggtatgattgacgtagcctcaagtcttcatcacctctcaagaaaaccagctttctccccggcatggtggttcacgcttgtaatcccagcactttgggaggccaaggtaggtggatcacaggtcaggagctcaagaccagcctggccgacatggtgaaaccccatctctactaaaaatacgggcgtggtggcaggcgcctgtaatcccagttacctgggaggctgaggcaggagaactgcttggaccctggaggcagaggttgaggtgactcgagattgtgccactgcactccagcctgggcaacagagcgagattccgtctcaaagaaaaaaaaagtaatgaaatgaataaaatgagtcctagagccagtaaatgtcgtaaatgtctcagctagtcaggtagtaaaaggtctcaactaggcagtggcagagcaggattcaaattcagggctgttgtgatgcctccgcagactctgagcgccacctggtggtaatttgtctgtgcctcttctgacgtggaagaacagcaactaacacactaacacggcatttactatgggccagccattgttctaagtgctttacttagatttagctttttttttttttttttcttttttgagatggagtcccactctgtcttccaggctggagtgcagtggcacaatcttggctcactgcaacctctgcctcccgggttcaagcgattctcctgcctcagcctcccgagtagctgggattacaggcgcctgccaccacgccaggctaattttttgtatttttacaaaatacaaattactaattttttgcattttcaccatgttggccaggctggtcttgaactcctgaccccgtgatctacctgccttggcctcccaaagtgctgggattacaggtatgagccaccacgcccggcccatttaatttaaattaatttatttaatccctccccttaacaacccgctaaagcaggtaagttataatcggcaccccttccacttttcaccctttttttctttttcatttcaatattttttggggaaacacttggtttttggttacatggataatttctttagtggcgatttctgagattttggtgcacccgtcacccgagcagtttacactatacccaatgtgtagtcttttatccctcacccccctcccacccttcccctctgagtccccgaagtcctctatatcattcttatgcctttacatcctcatagcttagctcccacttataagtgagaacataggatatttggttttccatttctgagttacttcacttagcataatggtctccaactccatccaggttgctgcaaatgtcattactttgttcctttttatggctgagtagtattccttggtgaatacctactactttttttttttttttagacggagtcttactctgtcaccaggctggagtgcagtggcgccatctcagctcactgcaacctccacctcccaggttcaagtgattctcctccctcagcctacaggcacgcgccaccacacccagctaatttttgtatttttagtagagacagggtttcaccatgttggccaggatggtctggatctcttgacctcatgatccacccacctcagcctcgctaagtgctgggattacaggcttgaatgagccactgcgcctgcactacattttctttatccactcgagggttaatgggcatttaggtttgttccatatttttgcaactgcaaattgtgctgctataaacctgtgcatgcaactgtctttttcatacaaagacttattttcctttgggtggatacccagtagtgggattgctagatcaaatgatagttctacttttagttctttaaggaatctccacagtgttttccatagtgattgtactagtttacattcccgccagccgtgtaaaagttcccttttcaccacatccatggccaacatctatatgttttgattttttaattatgatcattcttgcaggagtaaagtggtatctcattgtgtttttcatttgcatttccctgataatttgtgatggtgagcatttttttcataggtttgctggccatttgtatatcttcttttgagaatcgtctattcatgtccttcactttttacttttatttgaaaaaactgttttatttgtggatgatatcaaacatacacaagagtagatataagactacatgcagccgggcgcagtggctcacacctataatcctagcactttgggagaccaaagtaggcagatcacttgaggtcaggatttcgagaccagcctggccaacatgatgaaactccgtctctactaaaaatacacaaataatttgggtgcagtggcacgtgcctgtaatcccagctactcgagaggctgaggcatgagaatcgcttgaccccgggagtcagaggttgcagtgaaccgagaacgcgccactgcactccagcctgggtgatacagtgaggctcagtctcaaaacaaaacaaagaaaagtatatccatcacccagcttcaacaatgatcaactcatggccaatcttgtttcatctgtgctcccaacaacctccttccccaactccccaaaaattgggattattttgaagcaaagcccagacctcgcataaattcacctataaatgttttcaccacatatctctaaaattatcccattttaccactggggaaactgaggcatgaagaaatcacataacttaatcaaggtcacttttctgataggagttcagagccaggatcaaagcccagctctctggttctagagcccttgcctttgactgtcttgatgcctctggaatcttagatgagagtcttttttttttttttttttttggaaagacagggtctcactgtattgcataatcttggctcactgcaacctccacctcccagtttcaagcgattctcctgcctcagcctcctgagcagctcagattacaggcaccagacaccacacctggctaattgtttgtgtttttagtagagatggggttttgccatgctggccaggctggtctcaaactcctgacctcaagtgagccacccgcctcggcctcccaaagtgctgggattacaagcatgagccaccatgcctggatgcctatatctattatggacatgtctcagtaagctgtgtgcttaaaagctttgcattctactgtatgtaggtgatacctaaaaatgaaggcaaaggagaacagattaagtgtcatatattcataacacgaattagtataaagcaaggaaaatgaatgaacaatatacaataaacaggataaatctaagaaacataattttgagcaaaggagccagacgtaaaacaatacgtattacttgttccttttgtgcaaagtgccccaaaacaggcatttaattatgcatacttaggaagtgaaatgctaaaccaatcatgaaatgctaaaatgctataaaagtgtaaaaaaaatcctttccattggaagaagggaggggatagtcatgggagaaacagtagcaggcatctggcatgtaggcaacattctgtctcttaacctgggtgtacacttggtatcaattcattgagctatattcatttgttgtatgccctttttgtattgacatttaaaaatatataattccccggccgggcacggtggctcatgcctgtaatcccagcactttgggaggccaaggagggtgaatcacgaggtcaggagttcaagaccagcctagccaacaaggtgaaaccctgtctctactgaaaatacaaaaattagctgggcatgatggcttatgcctgtaatcccagctactcgggaggctgaggcaggagaattgcttggaccaggacccgggaggcggaggttgcagtgagccaagatcgcaccactttactctagcctgggctacagagtgagactccatctcaaaaaaaaaaaaaaaaaaaaaaaaaaaaaaaaaaaaaatatatatatatatatatatatatatatatatacacacacacacacacacatatatacatatgtatatataaaatttcccatcacatctgaatcatgaaatactaagagatacatttaataaaatatgtgcaaaaccagtacactgaaaaccacaaaacattaaagaaggaaacagaataagacttgagtaaggggcgagatccaccatgttcaagaatcagattactcaatattaagatattagtgctccagcccaggcgcagtggctcacacctgtaatcccagcactttgggagcccgaggcgggtggatcacttgaggtcagaagttcgagaccagcctgggcaacatggtgaaaccgatctctactaaaaatacaaaaaaattagctgggcatggtggcacacacctataatccctagggagactgaggtaggagaacagcttgaacccgggaaatgaaggttgcattgagcagagatagcgccactgcactccagcctgggcaaagagtgaaactccatctcaaaaaataataatagtaataaaagataatagtgttcatctgtagagtaaatgaatcccagacaaaattgaaataccagcaagctttatttatttatttatttatttatagaaattgtcaagctgaggctacaatttatatggcaatgtaaaggatcaacaagagccaaacatcttgaaaaagaaaaaccagactgggcgcagtggttcacacctgtaatcccagcactttgggaggctgaggcaggcagatcacctgaggtcaggagttcaagaccagcctggccaacatggtaaaccccatctctactacaaatacaaaaatgagccaagtgtggtggcgcacgcctgtagtcccagctactcaggaggctgaggcaggagaatcacatgaacccaggaggcagaggttgcggggagccgagatggtaccactgcactccagcctgggagacagagcaagaccctgtctcaaaaaaaaagaaaaaaaaagagaaaaaccaggctggcacagtggctcatgcctataatcccagcactttgggaggccaaggcgggcggatcacctgaggtcagaagttcgagactagcctgaccaaaatggtgaaattccgtctctactaaaaatacaaaaaattagccgagtgtgggggcttgtgcctgtaatcccagctacttgggaggctgagacacaagaatcacttgaacccgggaagcagaggttgcagtgagctgagattgcaccactgcattccagcctgggtggcagagtgagactcccactcaaaaaaaaaaaaaaaaaaaaaaaaaaaagaggccgggcacagtggtttatggtttatgcctgtaatcccagcactttgggaggccgaggtgggtggatcacgaggtcagaagatggagatcatcctggttaacacagtgaaaccccgtctctactaaaaatacaaaaaaattagccaggcgtggtggtgggcgcctgtagtcccagctacttgggaggctgaggctggagaatggcgtgaacccaggaggtggagcttgcagtgagccaagatcgcgccactgcactccagcagcctggacagagtgaaacttcgtctcaaaaaaaaaaaaaaaaagaaaaagaaaagccaaatggaaggatttatattaatatcaaaatttataataaaactacagtaataggctgggcactgtggctcatgcctgtaatcccaccactttgggaggccaatgcaagagcccagaagttcacttgagcttagaagttcaagaccagcctgggcaatatagtgagaacccatctctacaaaaacttaaaaaactagccaggcatgatggcatgtgcctgtggtcctagctattcaggaggctgaggtgggaggaccgcttgagcccaggaggtctaggctgcagtgagtcatgatggcactgctccactccagcctgggtgacagggcaagactctgtctcaaaaaaacaaaaaaccacacacacacactacagtaataaaggcaaggtgtactgggattccgatagaaagagatgaatggaataaactaggaagtccataaatatgtggtcaatagaatttttttttcttagagttgggggtctcactgtgtttaacaggctggtctcaaactcttggactcaagcgatcctcctgcctcagcctccctcacctgctttcaattgattactgacaaagatgctaagataattcagtggagaaaagacagtattttctttttctttttttttcttttttttttttttttttttttttgaggagtcttgctctgtagcccaggctggagtgcagtggctcaatcttggcttaccgcaaactctgcctcccgggtcccagttcaagcaattctcctgcctcaccctcccgagtagctgggactacaggcatgcatcaccatgcccagctgatttttgtatgtttagtagagacggggtttcgccatgttggccaggctggtctcgaactcctgaccttgtgattcacccaccttggcctcccaaagtgctgggattacaggtgtgagccaccacacctggccagtattttcaacaaatggtagaatgactaaatagcctcatggaaacaaaacgaaccctgccttttacttcacatcatacacaaaaattaacttgaaataggtcagagatctaaaagtacagactaaagctaaagaacttctaaaaacatattttcaaaaccttgaagtagatctttttttttttttaacatgggactcaaaaatcactaatcataaaggaaaaaattgacaaactggacttagtcaaaaataatactttcagccaggcacggtggctcatgcctctaatcccaacactttaggaggccaaggtgggaggattgcttgaacccaggagttctaaaccagcctgggcaacgtagtgagaaccagtctctatatttaaaataaataaataaataatagtagtacttttgctcatccaaaaccagcattaagaaaatatacggaccggccaggcgtggtgactcacacctgtgattccagcactttgggaggccaaggcaggcagatcacccgaggtcaggagtttgagacctgtctggccaaaccccatctctactaaaaatataaacattagccgggtgtggtggcacacgcctgtaatcccagctactcaagaggctgaggcaggagaattgtttgaacccaggaggcaggggttgcagtgagccaacattgtgccactgcactccagcatgggcaacagagagagactccatcaaaaaaaaaaaaaaggaaagaaaggaaaagaaaagaagatatatagaccaggcacagaccagaagaaaatattcacaacacatatatctcacaaaataacccgtgcctgaaatatctaaacaactcctatggctcaataaaaaaaaaaaaaaaaaagcccaaccagccgggcacggtggctcacacctgtaatcccagcactttgggagaccaaggtggggtggatcacgaggtcaggagatcgagaccatcctggctaacatggtgaaaccctgtctcttctaaaaaaatacaaaaaattagccgggcatggtggcacacgcctgtagtcccagctactcgggaggctgaggcaggagaatggcgtgaacctgggaggcgaagcttgcagtgagccgagatcgcgccactgcactccagcctgggcgacagagtgagactgcgtctccaaaaaaaaaaaaaaaaaaaaagcccaaccaaaaaatggccaacaggctataaaaaggtgtttaatgtcattagccaacaggaaacacaaattaaaaccacactgagataccaccacacacccataagaaaggctaaatggaaatatgcaaacagcacctagtgctggcaaggatcaccagaactctcgttcatgactatgggtgtataaaacgtacaactgcttagaaaaagtttctgcaaatttcttaaaagtttagcaggccaggcgcagtggctcgtgcctgtaatcccagcactttgggaggccgacgcgggtggaacacgaggtcaggagttcgagaccagcctggccaacacagtgaaaccccgtctctactaaaaatacaaaaattagccagccgtggtggcaggcacctgtaatcccagctactcaggaggctgaggcgggagaattgcttgaacccgggaggtggaggtggcagtgggctgagaccacaccattgcactccagcctgggtgacagagtaagactccatctcaaaaaacaaacaaacaaaaaagtttggcaggccagaggcggtggcttactcctgtaatcccagcacttggaggatcacttgagcccaggacttcaagaccagcctgggcaacatcaggagaccctgtctctacaaaaacatgaaaactagccgggtgagatggtgtgcacctgtaacccagctacttgggaagctgaggtggtaggatttcttgagcccaggaggtcagggctgcagtgagccagagattgcaccactgcactccagcgtgggcaacagaacaagaccctgtctcaaaaaaaataaaattagcatcacgcaacaacatagatacatttcaaaaacattgtgctgagtaaagcaagtcttgcacacaagagtacttatggtataattctggttatttgggctgccgaggcaggtggatcacctgaggccaggagttccagaccagcctggccaaaatggtgaaaccccatttctgctaaaaatacaaaaaattagctgggcatggtggcacatgcctataatcccaactgctcgggaggctgaggcaggagaattacttgaacccaggaggtggaggttgcagtgagccgaggttgcaccaccgcactccagcctgcgcaacaagagcaaaactctgtctcaaaaaaaaagaaaaggaaatgctggttatttaacgttctataacagacaaaactaacttatgtggggaggtgggacaaaagagttgttgtttctgagacactgactgagaagggacatgaggggactttttgcggtgatgatagtgctctatcttgatgggtgtttttattatacaggtacatgcatttttcaaagcacatcaaaccatatagttatgatttatgcattttattctatgtcaattttaccttgaaaacataaagattcaattttaggtaatgatattgatattcaagtgtctgggggtgaaatgtactggtgtctgccatttctatcaagaagcatcagaaaaataggcgaggtgcagtggctcatgcctgtaatcccaacactttgggaggccaaggtgggaggatcacttgaggtcaggagttcgagaccagcctggccaacaagatgaatcccgtttctaccaaaaaatacaaaaattagccgggcgtggtggtgcatgcctgttgtcccagctactcgggaggctgagatgggagaatcgcttgaagaaaaaaggcctggcgcggtggctcacgcctataatcccagcactttgggaggccaaggcaggcagatcatctgaggtcgggagttcgagaccagctagaccaacatggtgaaaccccatctctactaaaagtacaaaattagccgggcatggtggcacacgcctgtaatcccagctacccgggaggctgagacaggagaattgcttgaactagggaggcggaagttgcagtgagctgagatcacgtcattgcactccagcctgggcaacaagagcaaggcacggtggctcacgcctgtaatcccagcacattgggaggttgaggcgggcggatcacgaggtcaggagatcaagaccaacctggctaacacggtgaaaccccatctctactaaaaatacaaaaaaaaattagccgggcgtggtggcggggtcctgtagtcccagctattcaggaggcggaggcgggagaatggcgtgaacccaggaggcagagcctgcagtaagccaagatcgcaccattgcactccagcctgggtgacagagcgagattccatcccaaaaaaaaaaaaaaaaaaaaaaaaaaaagcaagggcgaaactcaatctcaaaataaataaataggtgcagtggctcatgcctgtaatcgcagtgctttggaaggctgaaatgagaagattgcttgaggccaggagtttgaggttacagtgagctgtgatcactccatggcactccagcctgggtgacaaagcaagaaatacaaataaaataaataataaggtggtttggtgggagggtagaaggatagatatgacaaaacaaacatgggaaaatgttcattgtagaatctaagtgatgagtatgtgggtgtttattatacaattctttaaacttttctttatgtttgaaattttttcctaatagtgttgggagaaagtaacatctattctgtgagccagttatttctccctttggtatttatccaagagaaataaaaacttatgtctacataaaactttgtaagagaatgttcatcccagccgggtgcgatggctcacgcctgtaatcccagcactttgagaggccaaggcaggtggatcacaaggtcaggagatagagaccaacctggctaacacggtgaaacccaatctctactaaaaacacaaaaaattagcccggcgtggtggtgggcgcctgtagtcccagctacttgggaggctgaggcaggaaaatgacatgaacccgggaggcggagcttgcaatgagctgaaattgcaccactgcactccagcctcggtgacagagcgagactccgtctcgaaaaaaaaaaaaggaatgtttatcccagctctattattggcaagagactgtaaacagctcagatgtccatcaacaggagaatggataaacaaactcaaactgtgctttatttatacaatggactcctactcaactattgaaaaggaatgaactactaattcaaactactaaaaggaatgaactactaacacactaataacgtgagtgaatctcaaacattttgctaagtgagattcaaaaaagggtgtattatatagaattctagtcacaggaaactctagaaaaggcaaagctaatctgtggttctagaaatcacaacagtgcttgcttttcaagtgcttatgaattgggaaaaggcatgatgaatgcttctatggtgatgaacacgttctgtgtcttgagagaaatttgggttacatgggtgtatgcctttgtcataattgactgaactgtaaacctgtggatttcatggaatgtaaattatacccttttaagaaagctgattataagtgggaaaggattctgcacatgctaaaccagataatttgtcacatagtgctttgtaaggctatgtgtatcggtatggaaacactaacagagatcctagatatattgctagatcaactttctagaagttgttcaaattattggctctgttggactaaactaaatgaagcttagttttgttgatataatatatagttgatatcatagatttgttgatgtaatgtagaggaagaaatccaaagactgaggccaggcatggtggcttacgcctgtgatcccagcactttgggaggctgaggtgggtggatcacctgaggtcaagagttcgagaccagcctggccaatatggagaagccccatctctactaaaaatacaaaattagccaggcatggtggcgcgtgcctgtaatcccagctactcaggaggctgaggcaggaaaatcacttgaacctgggaggtggaggttgcaacgagctgagatcgcaccactgcactccagcctgggcaacagagcaagactccatctcaaaacaaacaaataaacaaagactgatataataaatgttggagagtacctgttaagtttagaagatcatacacaccctaacaatatctcctaaggaaacatgcctttcacaatgacattgagaaatatactggcatcagaagcactagcatctttgaaaagccctgtaacggctggtatagaggtaaaaaaattcagatggctcatttcagccattgaaatgggttcccttattccaactggaatggcacattccaggacaaaagataggaaattaaagatttgacagacaccaaacaagacacacagatagcaaaaagcacatgtaaaaatgctcaatatcacaagtaattagggaaattcaaatttaagccacaatgagataccactacataactatccaaacgactggtcatatcaaatgttggccaggagagggaggaactggaactctcatgcactgccggtggaaatgtacaatgaatggtacaaccatttttggaaaacagtatggcagttgctcaaaaagttaaacatacctttatgatccagccccttccctcctatttagtcaagagaaatgaaaatatatgttcatataaaaacttgtggcagggcaaggtggctcatgcctataaccccaacactttgggaggatgaggcgagtggatcgcttgagctcaagagaccatcctgggcaacatggcaaagccctcatctctacagaaaatttaaaaattagccaggtatggtggcgcccgcctgtagttccagctactcaagaagctgaggtaggaggatcacttgagtctgggagatcaaggctgcagtgagctgtcattgcaccactgcactcctcctggggtgacagagcaagaccctgtctcaaacaacaacaacaacaaaaacttgtagtctgggcgcaatggctcacacctgtaatcccagcactttgggaggccgaggtgggtggatcacgaggtcaggagatcaagaccatcctggctaacatggtgaaaccctgtctctactaaaaatacaaaaaaaaaattagccaggcgtggtggtgggagcctgtagtcccagctactagggaggctgaggcaggagaatggcatgaacccgggaggtggagcttgcagtgagccaagatcacactactgcactccagcctgggcaacagagcgagactctgtctcaaaaataaatatacaaaaaaaaacttgtatacaagtgttcatagaagctgcatttttaatagccaaaaattgaaaacaccccaaatgttcatcaacaggtaaatggataaacaaactgtggtacatctgtacaatggaatactacttggcaatcaaaaggaatgtactattgatacatacagcaacatgaatcaatctcagaataattatgttggactcctccccccaaaaaggaacatactatatgattccgtttatataagactcaagaaaatacaaactaatctatagcaatagagaacaaatcagaggttgcttgaaaaatagggatgggagtgtaagtgggtgggagagattacaaaaaaatacaaggaaatgttgagattacagaaatgctcatttaaatatgagcagtggaagggcgtggtggctcacacctgtaatcccagcactttgggaggccaagtggggaggattgctggagtccaggagttttgagaccagcctgagcaacatggcaaaaccctgtctctaaaaaaaccaaacaaacaaaaaaactagcgaggcatggtgtacatgcctgtagtcccagctacttgggaggctgatgtgagagaatcaaaataaataaataaataaatatgagccatttgttttatgtcaattataccttgataaagttttttttagtgactttgggaatataacaaccaaacacagtctcagggcttttttgcattctgttttgaacaaagtaaccaaaaatgacttttctgagatcattggagaagtatgaatatggactgagtgttagatgaaattaaaggaatattatttttgctagctggaataatggcatgatggtactgctaaactttttatcattaagcaatgcatactgagatagttatggggcaaatatctgggattgtttaaaatgcttcggaaaacaggaatacataaaataagctgaggagaatgctgataattggtgaaactaggtgataggagtttattgcattcttctccctacttttgtagatatctgaatgtcactttcataataaagttagaaacaggctgggcgtggtggctcacacctctaatcccagcactttgggaggccaaggcaggaggatcgcctgagcccaggagttcaagaccagcctggccaacatagcgaaaccccatctctactaaaaatacaaaaatcagccaggcatggtggcatgtgcctgcagtcccagctacttgggaggctgagacacaagaattgcttgaacccaggaagcagatgttgcagtgagctgagattgcaccactgcactccagcctggatgacaaaagtgagactcttgtctcaaaaaaaaaaaaaaaaaaaaaagactcgaataaaataaaaagaatgactcctagatctctaattctagcaatcagggtatggtaataccacttaccaagatgcatgggagataaacaggttcagaggaaatcaagttctcattaagggccacattaaggttcataaagaacctttgggccaggcgtgttagctcatgcctgtaatcccagcactttgggaggccgaggtgggcagatcgcttgaggctaggagtttgagaccaacctgaccaacatgataaaaccccatctctactaaaaatacaaaaattagccaggcatggtggcaggtgcctgttatcccagttactcaagaagctgaggcaggaggatcacttgaacctgggaggcaaaggttgcagtgagccaagatcatgccactgcactccagcctgggcaacagaaaaaaaaagatcagcaaaaaaaaaaaaaaaaaaaaaaaaaaggctcacagggcggagtctgagggagatcccatgagctgccacctgtcctctttcagtggacttgtgtggagagggctttattccccagcaagaagccatgacaagcatggagcacttccaaccaggaaaactcacccaagctctggtgtccaaggtgttcactgggggtcagttacataggcagagagcacccaagtgacaactcctcagtctccagcccacagaggtcaaactaacacagtgttgcccaaagccccaggtatgcaaaaacagacaccatgagtcatggtgttagcataaactatccctctgtcccacccaaggcccagatgtgtacagatactgttatcaggcaggatattccaaaggcttagagcttaaggagtggtcaagggccagtttttttctttggaatgttcaatacttaaggacccatgccagcagagttaaggctttactgcacgtggccctacttctgccaatgaacttggagcttacgtagcatcttttttttttttctttttgagatggagtttcgctctttttgcccaggctggactgcaatggcacgatctcggctcaccgcaacctccgcctcctgggttcaagtgattctcctgcctcagcctcccgagtaactgggattacaggcatgtgccaccatgcctggctaattttgtattttttagtagagacagggtttctccacgttggccaggctggtctcgaactcccgacctcaggtgatctgcccgtcttggcctcccaaagtgctgggattacaggcgtgagccaccgtgactggccatagcatcttaataaagaacaataaatttgtttgggaggctgaggcaggagaatcgcttgaacccaggaggcggagtttacagtgaaccaagatcatgacactgcactccagcctgggtgacagagttggactccagatcaacaccaacaccaacaacaacaacaaaaaaaaaaaaaaaaaaaaaaaagaacaataaatttgtagagaatgacaagacacaggaaaagaacttttgagcttccgggcacagcaaattgtgggaagataaatatattgggcaactagtggaagataagggctggctcataaggtttgttatatagattcccctcctgccatctgtgggctgataagagtctagagattgtattggctattaagaaatcatcctgcccttcttggtagagaaggggagggcagagttctttcatgtgtctgctttttctcaactgtcttcagctcaaaataatgcttatgctggggtggcaaatttgaggtaacacactctcaaccccttcacccatcaatctaaggtgaccaggaactaacttgtagtctaacaaagccaggttcactgacccatttcaatgagggagaatgcacaccagaaccatggggcatctcaccaaacaaaggaaaagattggccaagcaaggtggctcatgcttgtaatcccagcactttgggagcccaagacaggaggatcacttgaggccaggagttcaagaccagcctgggcaacatagtgagaatccctctcttaaaaaaaaaaaaaaaaaaaaagttttttaattagccaagtgtggtggtgcaccttaattccagctactcaggaggctaaggcaggaggactgcttgagcccaggagttagaggctgcagtgagcctgtgattgtggtgatggagtgagaccctgtgaaagaggataagggggcagtggggaaggaaagggctgggaggggaggggaggggaggggaggagaggggagggagaggagaaagaaagaaagaaaagaaaagaaaggaaagaaggaaggaaggaaagaaagaaggaaggagagaggaagaaagaaagaaaaagagaaagaaaggaaggaagaaaaagaaagaaagagaaagaaagaaagaaagaaagaaagagaaacaaagaaaagaaaagaaagagaaaagagggaggagaggtaaggggaggggaggagaagaggtcagttcaagaccagcctggtcaacaaggtgaaaccccatctctactaaaaatacaaaaattagccagcatggtgctgctaatcccagctactcaggaggccgaagcaagagaatcacttgaacctaggaggcagaggttgcagtgagccgagatcacgccactgcaaaccaacctgggtgacagagtcagactccgtatcaaaaaaagaaatgaaataaattaattaattaagtgaaatgaaaataatttgtggatacaaggaaaaaatttaaaaattttagaaaaagaaaatgttacctacttctcagtggtatgtgaagatttagcaagacgtgtaggcaaagagctgaacacaagtccttataggacgcccttaacaaatattagctattgttgttatcgatatcagcattactttcacacagatatttttgatcaactgaaagcaccacccacctccacacacattaacccagagcaatgtattgtcagtgcttgagagaaagggctgactgggtgcggtggctcacgcctgtaatcccagcactttgggaggccgaggcaggcagatcacctgaggtcgggagttcaagaccagcctgaccaacatgtaaaaaccccaactctactaaaaacacaaaattagccaggtgtggtggcacactactgtaatcccagctactcgggaagctgaggcaggagactctttgaacccgggaggtggaggttgcagtgagctgagattgggccattgcactccagcctgggaaacaaaagcaaaacttcctctcaaaaaaaaaaaagagagagagaaagggctttgttgccacaacatgtaagttcagtcctagttcatttgcttccgagctgtgtgaacttaagcaattgtgtcattttcctgagcctcagtttccttatctgtaaagtgggaatcatatttctctcgggatttctgagaattaaatagaatcatattattattctctcttccactcaagccatttctgtctccctgctcccgcaattcctaaaccttcccacctcagctacagctcacagcgcctcctggaggcctggagggtctgatccttggagggggcgcaagaatgggagagtggataaggggcagggtgctgggctggagagggctggagagccctgggatgttacctgttctcactggaggagaccaaaggcacatttagcctgatggggggtgaggggttgcccctgtgcgagttatatctgcatgggtacttctgtgtgtgtttgtaggtaaagggcagttaaaagtctgggatgactggaaatctggaacctgaagtctttggagaatgaaaaagagtggttgtgcatgagtccctcagcagtataacaggggtaggttattctgaaatattagatataaatatagaatatgaatatattagcatagatgtacagataaatgatgtatacttatacaatagaaagatgatttagggctgggcctggtggctcacgcctgtaatcccagaactttgagaggccgaggcaggcagatcacctgaggtcaggagtttgagaccagcctggccaacatggagaaaccccgtctccacaaaaaatacaaaaattatcggctgggcgcagtggctcacacccgtaatcccagcactttgggaggcggaggcgggcacatcacgaggtcaggagatccagatcatcctggctaacacagtgaaaccccgtctctactaaaaatatttttaaaaaatagctgggcgtggtggcaggtgcctgtagtcccagctactcgggaggctgaggcaggagaatcgctttaacctgggaggtggagcttgtagtgagccgagatcgcaccactgcactccagcctgggtgacagagagagactccatctcaaaaaaaaacaaaaaacaaaacaaaaacaaaaattagcctggtgtggtggcacatgcctgtagtcccagctactcaggaggctgaggcaggagaatcacttgaacccaggaggcggaggctgcagtgagctgagatcaaacgactgcattccaccctgggtgacagagcgagactccatctgaaaaaaaaatgattatttagatagataatatagatataaagataaattatatagacataaatggtaaatagatgattcaaatatagatgatataaatatagtatagacgtgatatgaatatagaaatggatatagatgatacagacaggaaaaagcagacacataattatgttaatatctttaactactggccggcgtggtggctcacgcctgtaatcccagcactttgggaggccgaggtgggcggattatgaagtcaggagatcgaaaccatcctggctaccacggtgaaaccccatctctactaaaaatacaaaaaaaatttagccgggcatggtggtggacgcctgtagtcccagctactcaggaggctgaggcgcgagaatggcgtgaacccaggaggcggagcttgcagtgagccaagatcgcgccactgcactccagcctgggcgaaagagcaagactctgtctcaaaaaaaaaaaaaaaaaaaaaaaaaaattctttaactactgagatcttcggcttgggaaaaatggggtcctaatgtacagtttttatagagaaggcaagagacaactgggcatggtggctcatgcctgtaatctcagaactttgggaggctgagccgggcagattgcttgggcccaggagttcaagaccagcccgaccaacatggcaagactctgtctctacaaaaaatattaaaaattagccaggtatgatggtgagcacctgtagtcccagatactacagaggcggaggcatgagaatcacttgagcctgggaggttgaggctgcagtgagccatgattgcgccactgcactccagcctgggtggacagagtgagaccctgtcacaaaacgaaaagaaagaaagaaaaaaaaagcaagagacatgcctgattctttcctttacttactagttttcacaataatgagttggttccttagtgtccttcaaaagtggcctgtgaggttcggttcttttgagtatcaagatgttggcagagcactgtggctcacacctgtaatcccagcattttgggaggccaagacaggtggatcacttgaggtcaggagtttgagacaaccctggccaacatggtgaaaccctgtctctactaaaaatacaaaaattagtcaggcatggtggtggatgcctgtaatcccagctactcaggaggctgagccaggggaatcggttgaacctgggaggtggaggttgcagtgaaccaagatcatgccactgcactccagcctgggcgacagagtgagactccctctcaaaaaaaaaaaaaaaaaaaaaagatgctgattccctgacatgttggatcatggctatgtcagaatctagggataaaatactaacaagtgcttggaagagtaagtaaatgaaagacaagacagtgattgacttcaggataaacaagcccgtatgagaaaggaaatgccatcactgaatagttcactacacggcctaactgtggactcttatctattgcagagtcatcgtcatgcaagcattcaacattgatttaactagacatagtgataaatgtccaggcgtggtggctcacacctgtaatcccagcactttgggaggccgaggtgggtggatcacctgaggtcaggagtttgagaccagcctagccaacgtggcaaaaccctgtctctactaaaaatacaaaaattagccgggcatggtggcgtgtgcctgtaatcccagctactaggggggctgagcaggaggatcacttgaacctgggaggcagaggttgcagtaagctgagatcacgctactgtactccagcctgggcgacagagtgagactccaaaaaaacaaaggaaggaaagaagaaagaaaagagagagagacagagagaaagaaagaaagaaagaaagaaagaaagaaagaaagaaagaaagaaagaaagaaagaaagaaagaaagaaaggagggagggagggagggagggagggagggagggaagctaaacagagcaactgtgggagaggaagaaaatgagcactaaagggagttctccccaaaggtttcccaaagtctgcttcttggaggaattctatacaagactgaggtccctaaatctcctagatccaggcatagtaggctgaataacgccaccccaccccgcccgaagatgtccacaccctaatgctcagaacctgcgaacacattccccgacatggtaaatgaggttttgcggaagtgattaaggatcttgagatggaagggtcattctggattagctagtggacccaaggtaatcacaagcatccttctaacaggagagcagaaaggtcacagtcaggctgggcacggtgactcacgcctgtaatcccagcactttgtaaggcgaaggtgggcggatcacctgaggtcaggagttcgagaccagcctggccaacatggtaaaaccctgtctctactaaaaatacagaaattagccagtgtggtggcgtgtgcctgtagtcccagctactcaaatggctgaggcacaaggatcacttgaacctgggaggtggaggctgcagtgagccaagattgtgctattgcattccagcctgggtgacagagcaagactgcatctcaaaaaaaaaaaaaaagaaagaaaggtcagagtcagagaagatgtgaccactgaagcagagactggagtgatgcagtcagaagccacggcatggaggcagcctccagaggctgggagaaaaaagtgacagattctccactgaaacctccagaaggatccagccctgctgacacttgactttagcccgttaaggttagcttcagacttctgacctccagaactgtaagataataaatctgtgttgatttacaccactaagtttgtggaaatttgttaatggcagcaatagaaaaataataacaccatcggccgggtgcagcggttcacgcctgtaatcccaccactttgggaggccaaggtgggcagatcatttgaagccacgagttcgagaccagcctggccaacacggtgaaaccctgtctctactaaaaatacaaaaatcagcccagtgtgatggtgcatgcctgtagtcccggctactcgggaggctgagacaaaggatcccctgaacccaggaggtggaggttgcagtgagctgatcccaaagtgctgggattacaggcgtgagccaccgcgcccagacccctgttttttttcgtttgtttgtttgtttgtttgtttgtttgttttgaaacagagtcttgcttttgttgcccaggctggagtgcagtggtgcaatctcggctcactacaacctctgcctcccgggttcaagcgattctcctgccttttcatctcggccttccaaagcactgtgattacaggcatgagccactgtgcctggcctatttatttatttatttatttctaagatggagtttcgctcttgttgcccaggctggagtgcaatggtgccacctcggctcactgcaacttccacctcccgggttcaagcaattctcctgcctcagcctcccagtagctgggattacaggcaggtgccaccacgccaaactaattttgtatttttagtacagatggggtttcaccttgttgattaagctggtctcaaactcctggactaaagcggtccacccacctcagcctccccaagtgctgggattacaggcatgagccaccgctcccggccctggagtagcttttatgtggcaacaggagttagaaatccttctgtcctaaacagctcaggctcccacaacatactatatattgtctttctcttagtctttgcccaggctctccctgctccctctgtggttgcagttagggttcattcttggtccagggttaagattcgttccaaggcctggaacagcagtcagtctgtacctgtggtcaggacacaaactgataacttttactttcctggaatgtctactgatcctgtgacattgtccggcccctgctcattcaggtgctggaagagaatgcaaactattggagcctctggtttaggtttcctcaaggtcatctcagccatacccctgtctcctagagaaatttctcaagagattaagggactcattcaacttggcacataccttggttgccttaggtacttctttatcttcaaaataaattgtgccaaagtcctagatatcagaatgtcaacagggagaggttcccacccaggcctcccgtttccgcttgcaccttgcacctgttgggcagatgactttgcgcgagtcacttcctgactctggccctaaaacttcttttgtaaaacaaagggcatgggtcagagggtctctaatggggtcccaagattaaaatttcacagttctgagtgtctagagtctccaggcagtgtggtaccagctctggattcagagagacccaggtttgagcccaaagcctgggagttactgactggctggccgtgggaaagtgacggaacactcccaagcctcggtttcctcacgtgtaaaatgggaattaactaaggcaatgcctctcaaacacttggcacagcccctggcatggcatacagtccatgccattgctgttgagtttgtaatgattatatataattaagtctgtgctgacaatacgtagctacgtaggaccaagcatccagcagaacgcacagtccgagacactctaggttgtggtagtaactgctgtaaaataactcctttattattgcacgtcagaataggcaagagagtgtaacacagaaaacatcagctactcttcagggtggtgactgctccttagtctaggtatgtacacctggaagggtccgtgaacattttccatgggagagatggatacagagataagttaaaggaaattgccgggcgtggtggctcacatctgtaatcccagcactttgggaggtcgaggcgggtggatcatgaggtcaggagttcaagaccagcctgactgaattggtgaaaccttgtctctactaaaaaatacaaaaattagctgggcttgatggcgggagaatcatttgaacccaggtgacagaggttgcagtgagccaagatggcgccactgcacgccaagcctgggcgacagagtgagactccgtctcaaaataaataaataaataaataaataaataaataaataaataaaggaaattaatgcccaaatcctcacctttcaattgaacagttccccgaggagacctgcctgaaaatgccccagttgtataggaatgatttacccatatcctgtttcacttttcacccatcactcactttttctttttctttcctttttcctttttctttcctttctttttttttttttttttttttttttttgagacagagtcttgctctgtcgcccaggatggagcacagtggccccatctcagctcactgcaacctccgcctcccaggttcaagtgattttcccgcctcagcctcccaagtagctgggattacaggcgcacacaaccactcctggctaatatttgtatgtttagtagagatgggttttcaccatgttgcccaggctggtctcaaactcctgacctccagtgatctgcctgcctcagcctcccaaagtgctgggattacaggcgtgagccactgtgcccagactttctctttttctttttttttttttttttgccagaaagggtcttgctctgttgcccaggctggaatgcagtggctcaatcttggctcactgaagcctcaacttcccaagctcaagcaatcctcccacctcagcctcttgagtagctggaatcacaggtacgtgccaccacacctggctaatttttttttttttttgtaaagacagtgtctcactatgttgcccaggctggtcttgaactcctgggcccaagtgattctcctgcctcagcctcccaaaatgctggggttactggagtgagccaccatgcctggccccactttttactcacttttttgttcatttgtttgttcccacttaaaaaaaaaaatcctacctctcttccattttcagtacatgctctcagtgctgaaatcctctggtgaccaaatagagacatctagaacattaatagtggtgttaggaggaattcaattgactgggtaataaatccgccttcaagtctttgcttttcaatgttttgttttcaatactttgcagtcaacaaaactagaagaggacctagagcaattgccagctgaggagtcattcaactatattttgaagataggtgaccattgatttttggcatatagcttagaaggagttaaaagaattaagggacattgctatactgatattctttggattcccatctatttaattatgtgaacacattttctccaagcttgcatcaccaggggggtagacaatgaaagtttttctttttttcttttttttttttttgagacggagtctcgctctgtcgcccaggctggagtgcggtggcgcgatctcggctcactgcaagctccacctctcggggttcacgccattctcctgcctcagcctcccgagtagctgggactacaggcgccggccgccaccacgcccggctaattttttttgcatttttagagacgggtttcaccgtgttagccaggatggtctccatccgcccgcctcggcctcccaaggtgctgggattacaggcatgagccaccgcgaccggccgaaaatttttcaataaaaataaacttaaagaataccagcgcttccgccacggctgccattggagagcagcagccatggctctgcgcgaccctgtggccgtgggccccaaggtgaccaaggacgtgagcaagcccaggcacagctgccgccccggacgtctgaccaaacacaccaggtttgtgcgggacatgatccgggaggtgtgtagcttcgtctcgtacaagcggctcgccatggagttgctgaaggtccccaaggacaaacggtccctcaagttcatcaagaaaaggatggggacgcacatccgcaccaagaggaagcggaaggagctgagcaaggtgctggccaccatgaggaaagctgctgcctagaaagactgagccccctcccctgccctctccctgaaataaagaacagcttgacaggaagaaaaaagaaaaaaaaaccagcaacaattttatgtcaaaagtttgaagattagtgaacacattccttagaaaaataggccaggtgcggtggctcactcctgtaatccctgcactttgggaggccgaggtgggcggatcacctaaggtcaggagttcaagaccaacctggccaacacggcaaaaccccatctctactaaaaatacaaaaaattagccgggcgtgttggcaggcgcctgtaatcccagctacttggaaggctgagacaggagaatcgcttgaacccaggaggtagacattgcagtgagccgagattgcaccactgcactccagcctgggcaacagagcgagactccacctcaaaaaaaagaaagaaaaataaatacaacttgccaaaatggacacaaggagaaacaataaatatgaataatgctaaaatgattaaagaaatcaagtctaaaattaagtatcttccctccaatgtttatgataacccactagtgaaatttaccaaatatctaaggaagaaataatgccaatctcacataaactcttttatggtatagaaaaagcacagttttataaggcaggcagaaacttaattgccaaaacctgcctaagacaatataagaaacgaaaattacaggccagtctcactaccaaacttggatgtaaaaatcatacataaaatagcagccaggcacagtggctcatgcctgtaatcccagcacttgaggaggccaaggtgggtggatcacttggggtcaggagttcaagaccagcttagccaacatggtgaaaccccatctctactaaaaatacaaaaattatccaggcatgctggcaggtgcctgtaatgcaagctacctgggaggctagggcatgagaatcgcttgaacccaggaagcagaggttgcactgagccgaaatcacgccactgcactccagcctgggtgacagagcaagactccgaaaaaacaaaaactaaataagaggacttactctacctgatatcaaacttactagggagctatggtaattaggacagtgtagaattacccaaacatgaacagagaccaatggaagagattagtcagcccaaaataagaacccacttctggttgatgccaaggatggtattacagaaccatgaggaaagggtggtcttttccataatgagactgagacattgaatacctttacggggaaaaaggaaattcgaaacctacctgacatcacatcaaatattaattccagatggatcatatatctcaatgtgaaaagctaaacaataaaagctttaacagataatctagaagggtatctttatgcccccaagagagaaaaagtgttcttaaaaatgacacaaaaaagcacaaacattactgaaaagattgataaattggactacattcaaatgtagttcatcaaagacaccaggaagggctgggcgcagtggctcacgcctgtaatcccagaactttgagaggctaaggcggcagatccctgagatggggagtttggcagatccctgagatggggagtttgagaccagcctgaccaacatggagaaaccccatctctattaaaaatacaaaattggctgggtgtggtgtcacatgcctgtaatcccagctactcagaggctgaagcaggagaatccctttaacctgggagccagaggttgcggtgagccgagatcgcgccattgcactccagcctgggcaacaagagcgaaactccaattcaaaaaaaaaaaaaaaggcaccaggaaaagagtaaaacagggccgggcacggaggcccacgcctttaatcccagcactttgggaggccaaggcgggcggatcacttgtgtccaggagttccagaccagcctggtcaacatggtgaaaccccgtctctacaaaaaatacaaaaattagcccagtctggtggcatgcgcctgtagtcccagctacttgggaggctaaagtgagaggatcactggagcttgggaggttgaggttgcagggagctgagatcgtgccactgcactccagcctgggcaagagagtgagaccttgtctcaaaaaaaaaaaaaaagaaagaaagaaaattgtaggtgaaggtagaagtatctccagtgatcttcaagactggcacaatattctaaaaagatacatttgaacataaaaataaatgttaaccagacatcgtttttagaattatacaatacaaattctggtggggagttggctgagagcccctcctccagcttcctggtggtggcggtgttccacctcctgggtccccaccctcagtctcccttgctctgccttctcccccaccccacctccacatgctagaaaccaggtcctcttctcaccctctctcccaggtgagcctggtcactcacagagctgcagaatctgctgtctgtctgccaaggactcccaactctgtgtccacagcaaggatctgtgctaaaccacactggccttgctgggcctccagcgccatacactccctcttatggcttgtaacaggtgtttccccacctggaatgtttgctctcctctctcctccaaagtcctgcccctccctgaggtgagaaatcagttcccccacctcccccacagccccagcactctgtgctgaaatcatcatcaaaaaccctggtctcctccaatccctcctgctaccctctcagccacccaacatgctattccccctgcaggaacactcttccccatgatctttctcgagtcattcttcagatccatgtatcccctcctccaggaagccctccctgatactcaccactctccggccagggcaggcacttactctgggctcccacaggccccctggcctcccccatcccagccccgaccactctgggcagtcaaggtctggtgactaacctgcctcctcaactggactgtgggccccatgggggtagggctgtctctgtctctactgcctccccagcatcacccagtcaggcctggatgcaggcctggcatcaactctgcataaaggagcggaggtcaggagttccctggggcctcagtgcctggcactggtggaggggctttctgcatgccacactctggatcttctccagctactccttattctggaagctgcagcatgttgaaataaaaactggaactaaatggagatggaatggacttcacatttggacacatgggtgtgtaaagaggaacgtgacttctccaaagtaacgcatagaggccgggcgcagtggctcacgcatgtaatcccagcactttgggaggccgaggcaggcagatcatttgaggtcaggagttcgagaccagcctggccaacatggtgaaacgccatctccactataaatacacaaattagctgggcatagtggcacatgcctgtaatcccagctactccggaggctgaggctgaagaatcacttgaacccaggaagcagaggttgcattgaaccaaaatcgcaccactgcactccaacctgggtgacagagcgagactccgtctcaaaaaaaaaaaaaaaaaaaagtaacacactaacctcctgacccacccagagtgggtcttaccttctagaaagatagaaaagaatagaaccaggccaggctgactctggcagctttagaacaatagtaatggcaggagtggccggcgatggacagctgggggtgggactgaaatagacagcagccagggaatagtgggttgaagggagaaagggagttatttttctgtagtctttgaaattttatttttctctttccttttttggagacaaggtcctgctcttttgcccaggctggagggccatggcgcgatcatggctcactgcagcctcgaacttgagcgatcctccctcctcagcctcccaagtaggtggaacttcaggcgtctgccaccacacccagctaatttttaaattttttaaattttttctagagatgggggccttgctatgttgcccaggctggtctcgaactcctgagctccagcgatcctcccaccttggcctccgaaaggcctgagccaccgtacccggctgaaatttgtaatcaacccataatcatctattacttatgtaactgaattcctatgaaaagcataataaagtggagatcataaaggtgccgacttcgggctgttgtaagatttcggtgccacacctagcacagaaaaagcatggagagcagaagggcagtgaacgccagctggcacacgttggctacgtgcaagtattcgcctaaacgctgcgcaggtattcatcatatgatccccataaacctctgagggctgcactcacatgtcatccccgatctgctgatgagaagttcagttataggcccaaggtcacatatcccgagccagcgtaaaagtggaatccagggaggaggaggaggaggaggagcaggaggaggaggaggaggaggaggaggaggaggagaagaagaagaagaagaagaagaagaagaagaagaagaagaagagaaaggattactgtccgtctctctctggttctctgcacacccctcacctccagggttttcagtctgtctctggaccattctccttctctccccctgccccattctccaaaagcccaatggggtgacttgcaggctgggggcaccccctggtgcctgtgtgccgagtgcagaaagtcagggcggtacagggtggaggcaggtgagagtgtgggggtggtttgggtcccaccgagatatggaaaggtgggtatcagagtagagtgcactcattcatttcttcatcatcacagcccagagggtccactctgttctgggagtgttggggggtaggagtggagcaaaacaatgcccccagacgaagagagcagtgggagaaggagagaaggagcatcccagagccatagacacttaggggctgtgtgactctgggcaggtgacctagggtccttgaacctcagtttcctcatctgaagatggagatgatatgttagtatctccctcagagtattaatggatgctaggtacagttataagcttcatttacagatgaggaaaactgaggttggacaacttggccagtcacataaaagacgcagtggggtgctccctcagcaccactctccggctaagaattctggctgcagaggaggatggactccaggagaaagaacaggccgccattcccatggttcagcatggacatcggtggaatgctgttaaattggtctgttttgaggccgggagcggcggctcacgcctgtaatcccagcactttgggaggccgaggcaaatggatcacctgaggtcaggagttcgagacaagcttgaccaacatgacgaaaccccgtctctactaaaaatacaaaagttagctgggtgtggtggtgcgcacctgtaatcctagctactcaggaggctgaagcaggagaatcacttgaacccaggaggcggaggttgcagtgagccaagatcgcaccattgcactccagcctgggcgacagagcaagactctgtctcaaaaaacaaaaaaggaaggaaaagaaagaggcagtggtgttagcagggcaatgagttgaattccagtaactccggttcccctgggtttccaacccccagacctcaagcttgggcctccacactcctctccatcccatcccccaaacatgttcctgctaaactgttaagctccagttcctgcctatcccaccacttacccaccacccctcttctactccccctgtctccactaacctgccgatccacatattttcaacagccaagatcgctctcgacctgtgagcaggaagccagttgttgagacaggtacactttcatcccgtttaatgactgtgtcttcctcatctcatggcagtgtgaggcacgggcacacaggcctagggaaggcagacaagccctgtccctgcactcgccccactttgggctaggagaggaaaccagctcagacaaataatctcagatgcccgctgtttcaagatcctctggctgcagaggggagggtggaggggagcggaacctggaggcctggggctctgagaggagaatgggtggggcctagatgggaggggaaagagccagaatagaatgtgtggagggcagaagcgggcagatcaaagccaaatgctagaggcagaagaaaacagaaccccatgactcaggcgtttgaaatgaggaaattctcaacccagatagatgcagaactgattctaagaggaaaagattagaaacaacctagagatctgatcagatgggaaattaaatggatggagaggtgtgccaaagccttctctgaaacacctcccaggcattaaaattagtgatccagagccagctgtatggatatgaatgaatcttaaaagctgaaggacaaaagccagttgcagaagaagggatgtggactgtgtgctgtcctgggcataaagttgtttttttttttttttgagacagagtcttgctctctcacccaggctgaagtgcaatggtgcgaactcggctcactgcaacctccgcctcccaggttcaagcgattctctagcctcagcctcccaagtaggtgggattacagccgcctgccaccacgcccagctaatttttttatttttagtagagatggggtttcaccatattggacaggctggtctcgaacttctgaccccaagtgatccacccacttgggcctcccaatgtgctgagattacaggtgtgacccactgctcgcagagtgcataaagtttttaagcctgcaaaagaatgttttcccaggccaggcacggtggctgacacctgtaatcctagcactttgggaggccgaagcaggcagatcacttgaggtaatagagttcaagaccagcctggccaacatggtgaaaccctgtctctactaaaaatacaaaaattagccaggcttggtggtgggtgcctgtagtcctagctactcaggaggctgaagcaggagaatcgtttgaacctgggaggcagaggttgcagtgagccgagatcttgccactgcacttcagtctggacaacagagtggaactccatctcaaaaaaaaaaaaaaatccacttgttctctgggtgcagtggctaatgcttgtaatcccagcactttgggaggcctaggtgggcagatcacatggccaggtattcgagaccaacctgaccaatatggtgaaaccccatctctactaaaaatacaaaaattagccaggcgtggtgggcacctataatctcagctactcgggaggctgagacaagagaatcacttaaacctgggaggcggagattgcagtgagccgagatcatgcctttgcattccagcctgggcaacaaagcaagactccatctcaaaaaaataaaaataaaaataaagaacgttttcccaaataattgtgtgtggttgcacaaatatgcaggaaaacaatcagaacgtacctggaaatattaattataagatagtgcctcccgctgggctcagtggctcatgcctgtaatcccagcactttgggaggctgaggtgggcagatcacaaggtcaagagttcaagaccagcctggccagcatagtgaaaccccatctctactaaaaatacaaaaattagccaggcatggcggcatgtgcctgtaatcccagctactctggaggctgaggcaggagaattgcttgaacctgggaggcggaggttgcaatgagccaagatcacgccactgcactccagcctgggcgacagagcgagactccgtctaaaaaaaaaaagacagtgcttcccctgtaggagggagagaaggatgtgacgtttcagaagggatacagggaaccccaaacccggtcatgagtattttatttctctaaataaataatggtaaaaatgttaagatattgtaaagataggtgtgtatgtataatcgtggtaattcctctaatcctttctccatgtctgtatttgaaataattattttcaaggccaggcgcggtggcccacgcctgtaatcccagcactttgggaggctgaggcgggtggatcacttgaggccaggagtttgagaccagcctggccaacatggtgaaaccctgtctctactaaaaatacaaaaattagctgggcatggtggtgtgtgcctgtagtcccagctactgggaaggctgaggcaggagaatcacttgaaccccggaggcagaggttgcagtgagctgagatcatgccaccgcactccagcctgggcgacagaacaagactccatttcaagaaaaaggaataattatttttggctgggtgcagtagctcacgcctgtaatcccagcactttgggaggccgaagtgggcggaacacctgaggtcaggagtttgagaccaacctggccaacatggtgaaaccctgtccctactaaaaatataaaattgcttgaacctgggaggcagaggttgcagtgaactgagaccactccactgcactccagcctgggtgacagagcgagactctgtctcaaaaaacagtaattattattatttttaaaataacatatattttggaggctgggcacagtggctcacgcctgtaatcccaacattttgaggggccaaggagggaagatggcttgagccagaagttcaagacaaccctgggcaatatagtgagacctcatctctacaaaacatttaaaagttggccaagtatggtggcatgcacccgtagtcccagctatctacaaggctgagatgggagggtcacatgacccgggaaggtggagggtgtaatgaccccaccaaaacactgtactccagcctgggcaacggttcgaaatcctgtctcaaaaacgtatacttggttgagcacggtggctcacgcctgtaatcccagcactttgggaggccgaggcgggcggatcacgaggtcaggagatcaagaccatcctggctaacacggtgaaaccccgtctctattaaaaatacaaaaaaattagccaggtgtggtggcgggcgcctgtagtcccagctactcagaaggctgaggcaggagaatggcgtgaacccgggaggtggagcttgcagtgagccgagatcgcgccactgcactccagcctgggcgacagagcgagactccgtctcaaaaaatatatatatacttttgaaatacctttttttttttttaataaggggactggagggggtggaaccaggtgatagttggatacagagggagatgaaggaaaggaagcaaaagctgtcccccaggagacccgaaattttatttttctcaacttatggttgccttcctgatatgaatttgtaggagcagtgccttatttttttcttcttgcaccctcacccagctacgaagagtagtacttagaaaagaacttttaggcctggtgcagtggcttacgcctgtaatcccagcactttgggaggccaaggtgggtggatcacttgaggccaggagttcgagactagcctggccaacatggtgaaaccccaattctattaagaataaaaaaaatggggccggtctccagctcctaaccgcgagtgatccgccagccttggcctcccgaggtgccgggattgcagacggagtctggttcactcagcgctcaatggtgcccaggctggagtgcagtggcgtgatctcagctcgctacaacctccatctcccagccgcctgccttggcctcccaaagtgccgagattgcagcctctgcccggccaccaccccgtctgggaagtgaggagcgtctctgcctggccgcccatcgtctgggacgtgaggagcccctctgcctggctgcccagtctggaaagtgaggagcgtctctgaccggccgccatcccatctaggaagtgaggagcgcctcttcccggcagccatcccatctgggaagtgaggagcgtctctgcccggccgcccatcgtctgagatgtggggagcgcctctgccccgccgccccgtctgggaggtgaggagcgtctctgcccggccgccccgtctgagaagtgaggagaccctccgcccagcatccgccccatctgagaagtgaggagcccctccgcccggcagccgccccgtctgagaagtgaggagtccctctgcccggcagccacccagtctgggaagtgaggagcgtctccgcccggcagccgccccggccgggagggaggtgggggggtcagccccccgcccggccagccgccccgtccgggagggaggtgggggggtcagccccccgtccgggagggaggtgggggcggtcagccccccgcccggccagccgccccatccgggagggaggtgggggggtcagccccccgcccggccagccgccccgtccgggagggaggtggggggtcagcccccctcccggccagccgccccgtccgggaggtgaggggcgcctctgcccagccgcccctactgggaagtgaggagcccctctgcctggccagccaccccgtccaggagggaggtgggggagtcagccccccacccggccagccgccccgtccgggagggaggtgggggggtcagccccctgcccggccagccgccctgtccaggagggaggtgggggggtcagccccccgcccggccagccgccccgtctgggagggaggtggggtcagccccccgcccggccagccgccccgtccgggaggtgaggggcacctctgcccagccgcccctactgggaagtgaggagcccctctgcctggccagccaccccgtccaggagggaggtgggggagtcagccccccacccggccagccgccccgtccgggagggaggtggggggctcagccccccgcccggccagccgacccgtccgggagggaggtggggggatcagcaccccgcccggccagccgccccgtccgggagggaggtgggggggacagcccccgcccggccagccagcccgtccgggagggaggtgggggggtcagccccccgcccggccagccgccccgtccgggagggaggtgggggggtcagccccccgcccggccagacgccccgtccgggaggtgaggggcgcctctgcccggccgcccctactaggaagtgaggagcccctctcccagccaccacctcgtctgggaggtgtacccaacagctcattgagaacgggccgggatgacaatggcggttttgtggaatagaaaggggggaaaggtggggaaaagattgagaaatcggatggttgccgggtctgtgtagaaagaagtagacatgggagacttttcattttgttctgtactaagataaattcttctgccttgggatcctgttgatcggtgaccttacccccaaccctgtgctctctgaaacatgtgctgtgtccactcagggttaaatggattaagggcggtgcaagatgtgctttgttaaacagatgcttgaaggcagcatgctcgttaagagtcatcaccactccttaatctcaagtacccagggacacaaacactgcggaaggccgcagggtcctctgcctaggaaaaccagagacctttgttcacttgtttatctgccaaccttccctccactattgtcctatgaccctgccaaatccccctctgcgagaaacacccaagaatgatcaataaaaaaaaattaaaaaaaaaaaaaaaaaaaaaaagaataaaaaaaattagttgggcatggtggcaggcgtctgtaatcgcagctactcaggaagctgaggcaggagaattgcttgaacttgggaggcagaggttgcagtgagctgagatcgtgccactgcactccagcctgggcaacagagggagactccgttaaaaaaaaaaaaacaaaaacgaagaagtcaaggcaaaagtagagagtttatttatttgagccaagcttgagggttgcaaatcagaagtatagattcaaattgccctgaatatgcactctgatttagcagtacttgcaagttggatttattttattttattttattttattttttggtctgagacagggtctcaccgtgtcacccaggctggagggtagcaacaagatcatagctcaccacagtcttgaactcctgggattaaatgatcctcttgcctcagcctaccagtggattttttttcttttttgagacggagtctcactctcttgcctgggctggagtgcaatggcgcgatctcagctgatgcacctctgcctcccagtttcaagcaatcctcctgcctcagcctcccaagtagctgggattgcagacgtgcaccaccatccctggctagtttttgaatttttattttaatctttttttttttttttagtttttcttagtttttgtatttttagtagaggcgtggtttctccatgtctgccaggctggtctcgaacttctgacctcaggtgatctgcccaccatggcctcccacagtgctgggattacaggcatgagccactgtgcccagcgaacaagtggatttttaaaggtaaaaaaagggggacagggagtgggactgacacaagtggatcgcttgagcccaagagtttaagaccagactgggcaacatggcgaaacctcatctctacaaaaaaaagtacaaaaattaggcaggcatggtggtgcatgcctgtgattccacctactcaggaggctgaggtgggagaatcacctgggcctgggaggtcgaggctgcagtgagccatgaacctgccactgcactccagtctgggctatggggtgagaccctgtctcaaaaaaactcaataaccacccccgctaaaaaaaaaaaaaaaaaaaaatgcttgtcaggaattcttattggtttacaaaaataacataactctcaggagtttgagaccagcctggccaataaggtgcgcgccaccacgcccagctaatttttgtatgtttagtggagatgggttttctccatgttggccaggcaggtctcaaactcctgacctcaggtgatctgcccgccccggcctcccaaagtgctgggattacaggcatgagccactgcacccaccccttgacttctttcttttaggtccacagtacatagaacatgtcaggaaaagaaaggatggggtgaggtgatggggtgaggatgtaggataatgggacaggatgagcagtgggatgaggggatggaatgaaggactggataagggataggtgggggtaaatgagagcatgggggaggcagtgctctcctgatggtggggtgcacgagtggatggatgacaggataaatagggaagggaggagggataggatgacgagacggctgtagaagcccagagcagagaacattgctgctttggggtcgatgatgtaatcacctcaactcactgacactattcccagccacggatgatgctcacagaatctggggaagtccaaggcctggaagcaggactcatcttggacttccccttctatctagttccaggtgctgaatgaggcacctctgaagaagagaaaggagagagactaagataaacaagactgagaggaaaaaatcagagtgggcaggcagagtgagcctggtaaagtggaccacagagcagacaggctgtggcttagccttggacagcaggtggggttccagagccatatgcttggaggagccttagcaaactaaatcccccagcagtttcttaaacccatccatcacacagcttgccagaaccctggggttggcagcttccagaatggttaggaaaatccacagtagtggtcaggcgcggtggctcatgcctgtaatcccagcacttagggaagccaaggcaggcggatcactaggtcaggagatcgaaaccatactggttaacacggtgaaaccccgtctctactaaaaatacaaaaaattagctgggcatggtggcatgcgcctgtaatcccagctactcgggaggctggggcaggagaatcacttgaacccgggaggcagatattgcagtgagccgagatcgcgccattgcactccacctgggcaacagagcgagactccgtctcaaaaaaaaaaaaagaaagaaagaaaaagaaaatccacagtagggggccagacacaaaaatgatcactccagcactgtccagcccagatcagagggtttctgatgggaagtagctggggtcagggcaaggagtggtggaaaaagtcaggctgttttcagctgaactatacaaatgggcatctcctggcccagggtggggatttggcattgcagaaaggccagaatccacctggaatcactcagttactgtgaaatctatcttgggaacctaagaatgtttgctttctagacttgagaattttggacacttgattgctttctggatgaattttagagatttataaattgtattgaaagtgtttattcgacaagatgtttattgagcatccacagtgtgttaggcactggggatacagcaacacacaaaacagacagagaatcggcccttatggagagaccatttcagtgggaaaagggagtataaaaaagcaaatcaaggtcgggagcagtggctcccaccagtaatcccagaactttgggaggccgaggcaggtggatcgcttgagccctgggcaacatagctaaaccctgtctctacaaaaaattagccaggcatggagcgcgtacctgtagtcccagctactcaggaggtcgaggcaggaggatcgctgacatctgtgaggcagaggcttcagtgagcagagatcacactactgcactccagcttaggcaacagagcaaaactctgtctttaaaaaaaaaaaaaagtaggccgggcagggccgggcccagtggctcatgcctgtaataccagaactttgggaggccaaggtgggtggatcacttgagtgaggtcagaagttcaagaccagcctggccaacatggtgaaaccctgtctctactaaaaatacaaaaattagctaggcatggtgtcacatgcctgtagtcccagctactcaggaagctgaggcaggagtatcacttgaatccaggaggcagaggttgcagtgaacggagatcacaccactgcactccagcctgggcaacaagtgtgagactccatctcaaaaaagaaagtgaatcaatatataaaatataaaaagacaaaaaataatacacgttggcaatgatgtggaggaaaggaaacataccctgttggtgagaatgtaaattagtccagccactatgagaaacagtatggaaatttctcaaaaaactatcataagggctgggtgcggtggctcacgcctgtaatcccagcactttgggaggccgaggtgggtggatcacaaggtcaggagatccagaccatcctggctaacacggtgaaaccccgtctctactaaaaatacaaaaaaaaaaaaaaattagctggccatggcggcgggcacctgtagtcccagctactcagaaggctgaggcaggagaatggcgtgaacccaggaggcgaagcttgcagtgagccgagatggcaccactgcactccagcatgggcgacagagcaagactccatctcaaaaaacaaacaaaaaacaatcatatgatccagcaatcccactactgggaatttatggaaaggaaaagaaatcagtgtatcaaagggatagctacacagcaatgtttattacagcactattcacaatagcaaagatatggaatcaacctaaatgtccatcaacagatgaatggataaagaatatgtggtacatctacacaatggaaaactatttggccgttagaaaaagaataaaatcctgtcatttgcagcaacatgtgaaactgtctgtccctacagggttgacaagaactgcaagccaggttctagatagaaatataattaagcattggctgggcacagtggctcacacctgtaatcccagcactttgcgaggccgaggtgggcagatcacttgagggcaggtgttcgagaccagcctggccaacatggtgaaaccctgtctctactaaaaatacaaaaagtagctgggtgtgatggcaggtgcctgtaatctcagctacttgggaggcctaggcagaattgcttgaacccgggaggcagaggttgcagtgagccgagatcatgccattgcactcccagcttgggtgacagagtgagactcaaaaaaaaaaaaaaaaaagaaaaagaaagaaagaaagaaaattaagcattaatcatgctgcactttggtccacttccttgttgctgaaagccacatagctctagatgctgaccatttgtatccccattgttcttatagacagcatcgctgaccttagaatcatgatgtttttgttaaggatcacgtcagatgttttttggacccccaattccagccaccagtttgaagacccctacagaggatggggattgtcaggcctctgagcccaagctaagccatcacatcccctgtgacctgcacgtatacatctagatggcctgaagtaactgaagaatcacaaaagaagtgaaaatggcctgttcctgccttaactgatgacattaccttgtgaaattccttctcctggctcatcctggctcaaaagctccccggctgaacaccttgtgacccccacccctgccagccagagaacaaccccctttgactgtaattttccactacctacccaaatcctataaaacggccccacccctatctcccttcactgactctttttggactcagcccgcctgcacccaggtgaaataaacagccttgttgctcacacaaagcctgtttggtggtctcttcacacggacgcgagtgaaagggatcagcatgagactataacttcttcttccaccctctgtcccgtgacttcactctgcactcttcaaccaatcaacgatctccacccttcagcccactccaaaacccttgaacaccctagccccaaactcttaggggagatggatgtgaggtttccccccatctcctcattcagtgaccctacaattaaacctgcttctctgctgcaaaccagttataactgtagtaggctcattgcccagtgcacacagcaaatcaacaggagacactgggttgcaggagagaagaggtttcatcgtagggtcgccaaaagagatgaggagttgaagaatgtagggtgaagtcacgggacagggagatgaagaagccacattctcatgctgatcccattccccagtgggtagccttcacactggttgctggaattcaaggtctgaaaagcatctttttacatttttgtttatgtatttattattattattattattattattattattattattattattgagatggagtctcactctgtctcccaggttggagtatagtggtacaatctcggctcactgcaacctctgcctcctgggttcaagcaattctcctgtctcagcctcctgagtagctgggattacaggtgtgaaccacctccccccaccacctccactccgctaatgtcctttgtatttttagtagagatagggtttcaccatgttgactgggttgatcttgaagtcctgacctcaagtgacctacccacctcagcctcccaaagtgttgggattatgggtgtgagccaccgtgcctggccctgaaaagcatcttaagtgattctttctttaacaaaagccttatgactctaatatcagagattctgtctataggaacaatgggggtgcacatggtcagtatctagctctacctgagttttagcaacaaggaaatggaccaaagtgcagcccgaataacacttaattataagtatgtttctgtccagaacccagcatgcaattcttgtcagccctgtgggaatggtttcacagtgtctcgatatactgacttgctgtgtgcattgggcaacaaacctattacaattacacatggatgtaactggaggtcattacattaattgaaataagccaggcacagaaagataaacaatgcatgttcttactcccaagtggaagctaaaaaagttgatcacatggaggtagagaatggaatgatggatactagagactgggaaaggcgtatgggtggggtggggtggggagagaggttggttaatacacctagacagaaggaataagttccctttttttttgagacggagtctcactctgttgcccaggctggaaggcagtggcacaatctcagctcactgcaacctctgcctcttgggttcaagcaatcctcctgcctcagcctccagagtagctgcgattacaggcacgtgccaccataaccggctaatttttttttttttttcagacggagtctcactctgtcacccaggctggagtgcagtggcacaatctcagctcactgcaagctccacctcccaggttcacgccattctcctgcctcagcctgccgagtagctgggactatagacgcctgacaccacgcccggctaattttttgtatttttagtagagatggggtttcaccgcgttagccaggatggtcttgatctcctgacctcgtgatctgcccgtctcggcctcccaaagtgctgggattacaggcgtgagccaccacgcccggcaagaacttttaagttttcttatctataggatgttgcaatcatcatctttaaacattagacatggaatctttataataatcttgccatatatatatatatatatatattttttttttttttttttttttttttttgacactgagtctcactttatcgcccaggctggagtacagtggcacaatcttggctcactacaacctccacctcctgggttcaagtgattctcctgcctcagccaccccagtggctggggactacaggcgtgcaccaccacatccagttaattttttttttttttttgagacggagtctcgttctgtcgcccaggctagagttcagtggggagatctcagctcactgaaacctccgccttgtgggttcaagcaagcaattctctgccacagcctcccgactagctgggattagaagtgcccaccaccacgtctggctaatttttgtatttttagtagagacggggtttcatcatcttggccagactggtcttgaactcctgaccccgtgatccacccacctcggtctcccaaagtactgggattacaggcgtgagccactgcgcctggccggttaatttttatattttcagtagagacaggatttcaccacgctggctaggctggtctcaaactcctgacctcaggtgatccacccgccttggccactgtgcctggtcaacagtctttctatttttattctaggctggagacctttgtctcaaaaacaaaacgagaatgctccctggagtctgtactgatccctcttccctcccaccgtagattagttttctccttgcatttaaaaagacctttctggctggcatccagtgaatgaattgtggaggagggggagaaggagagaggaagcaggtagctcagtggggaagctactgcaaaatcctggcaagcaatgacagtaccttgaatcagggctggtgtcagttggatcagggtggtagggaaaggaggaaatggataaatttggaatgtatttggaggtagagccagcaggatttgctgacaaactgggtttaaagtcaaagagagaaatcaaggttaaacctgacaaataaaaacagatgtggtctcaggcgagtagagacattatgcagaaagactattgcatcagggggaaagatggctgtaaaaacaatgaacaagaccagaatctgataacccagaaggatgtgttgtctaatgaaactaattttttcccctcctcctattttttttttgagacggagtttcactcttgttgcccaagctggagtgcaatggcgcgatctcggctcactgcaacctccgcctcccggattcaagcgattctcctgcctcagcctccctgagtagctgggattacaggcatgcaccaccacacctggctaattttgtatttttagtagagacggggtttcaccatgttggccaggctggtctcaaactcctgacctcaggtgatctgcccacctcagcctcccaaagtactgggattgcaggcatgagacaccgcgcccggcctctcctatattttgttgtcatcagcaagtgaaaagatggtgataccttttacagaggtaaggaaggaggtgagagaaagtattcccagatggggtgggaagctggtacagcccactttgcaggaggtgggggaatcgggaattcttttatatccatgaagtttgagatgtctgttagctctcccaggggtagaacagagggagcagataggctcaaggttggatttggaacgtcctagaaaccttccagaacaaggcaaaggaggaactgagaactggcatttacttcatagcaagagcgtatgagcctccccacccctcctcctttggcttcagggcacccctggaatgttagaggctagaatcaatgctaaagaagaccacagtcaaggattccccagactccagggagcactctggctatgctcttgagagaaagggctctggactagaatacaaattgcaagattgcaggccgggggcagtggctcatgcctgtaatcccagcactgtgggaggccgaggtgggtaaattgcctgaggtcaggaggtcgagaccagcctggccaacatggtgaaaccccaactctactaaaaatacaaaagttagctgggagtggtggtgggcgcttgtaatcccagctactcaggaggctgaggcaggagaatcacatgaacccaggaggcagagattgcagtgagccaagatcgtgccactgcactccagcctgggcaacagagcgagaccctgtctcaaaaaaagattgtgaaaattctaagaatctaatttttttttttttttttttttttttgagacggagtctcgctctgtcgcccaggctggagtgcagtggcgggatctcggctcactgcaagctccgcctcccgggttcacgccattctcctgcctcagcctcccaagtagctgggactacaggcgcccgccactacgcccggctaattttttgtatttttagtagagacggggtttcaccattttagccaggatggtctcgatctcctgacctcgtgatccgcccgcctcagcctcccaaagaatctaatattttaaaactccagcatatgcaactcaaagctcatctaattatacacttaagagttatgtatttcattgtatataagataccttgaggaacaaaaagtatctgtaaacaaatactgagctctagctactgatatgcatgctgatgtatttgggagtgaagtgtactggtatctgcaactgactttgaaatgcttaaaaaaaaatcaatggataggcaaaatgaacagatatgtaatgaaaaaagggccaggcacagtggctcatgcctgtaatcccagcactttgggaggctgaggtgagaagatcacctgaggtcaggagtttgagaccagcctggtcaacatggcaaaaaccccgtctctactaaaaatacaaaaaatagccaggcatggtggtgcacgcctgtaatcgcagctacttgagaggctgaagcaggagaattgcttgaacccgggaggcagaggttgcaatgagccaagactgtatgctattgcactccactctgggcaacagagtgagactctatctcaaacaaaaaaagaatagataggtaacaaagaaaggataataaaatggtggaatctgatgggtatacaggtgttcactgtatgtttgaaattttaatatttttataataaaatacgaaatcaaaatgcaaagcaaacaaagtaactgccctgctgaaaacccctccagacagcttccgtttgcaatagaaataaaatgcagtcttttccaagaccttgcaagatggcccctgcagacttcatgaatcttatctcctacattcaatctttgaaaatataacaaatatttattgagtgcctactgtgtgtcaggcactgcactatatgttggggatacagcagtgaaccaaacctacaataattcatgcacaaatggttctaacattcttccttctcaagaagcccattcccctggcaggccttctcacttcctgaaattgttttcatctcatcttcatctgcatgtggatatgagctcaggaaggccagagcccttctctccatcgctcatagctgcaccctcgggtctagaacaaggtcttgtttatagtaagacctcaataacagttagttgcagaaatattagctaacatctatttagtgcttgttacatgtgcacctgcgtctgctttaaatggtgtgcacagatgtactatttaatcctgaaaactagccccattttacaaggctaacagaggcacagaggaattaggctgtgaattcaagcagtctggcttcagccatcacggtcctaaccgctctgcaaactgcctctaaacgaatgaatgaatgactcaatcattctaactggcccaagtcaaaatattaactctgccactcagccaagttgacctggggccaaccgatttatctccctggacttcagattgtttatccttaaaggtcaagtccttcctctcagttcgtgaagatgtaagatgctggagaaaattgactcaaagacaccccatacacgcacgcacacaggaacccacatccgaacaatgagcgaggtaggagctggggagagtggcgcggggtcaccgccagatgcggggtgtggcaacctccaggcggccaaagtctctgacttccaggttcttctgtttgcttactccctatccgggggcccaaggcgctgtctccgccgcccaagccccgcgtaaacctgggtgacctcggagacatccgttggagcatgagttcccgacatcaggcggcggcggtggtccgggagaaacccggcggcggggagataagcctgcccaggaggcagggggctgggctagctgccccgccccgcgcctgacttcgttggggagggagacgcccggctcccgcccctaactagcccagccgcgcggagcgcctgggagaggagaaggagccgacctgccgagatggaggcgaccggcacctgggcgctgctgctggcgctggcgctgctcctgctgctgacgctggcgctgtccgggaccagggcccgaggccacctgccccccgggcccacgccgctaccactgctgggaaacctcctgcagctacggcccggggcgctgtattcagggctcatgcgggtaaggggctctggggacgtcctggctaggggtgggaggattcctgggagagaaacccgagtgccagggtgaggggcttttcgggtatcctagggaggaggcaggggcaggggtcccaaggcaaaggggctgctgctgtcctggggttgggggcaggagcaggttgtccagggctgagaaggggagaggtgcccgggagagaggatcgtggggtgggggaccagggctaggaggggcagagacctctgcctacagaatcctgggaaggtgatgggcagggaccgaggctgaaagagacaggagtcctccagccgaggagaagctgatgcagctgggcttgtcccagagggagaggtagctggagccatacaggtggggcatgctgaagagggcacaaagaagaaaagggggaggcgtccctgcggggagttggaggcagagaagaggctggagggttgcaggctcagagagggggtcccgctgaaggaatctgccagcagagaatgcaggatgggaggatgggtggagctcagttgggagttcctgggactggggaggaaggagagcaagaaagaaggcagaggcagccccagccttaggggatagcaggtgggagtgggcagaggcctgaagtttcccattcaaaaggattctgggtgacttcaaggacgtagaaaaaagggtggggtcttgggggagagatggggcggatactcagcagtgtctgctccagaatttcagggttttgtggtgactgaaaggggtggctggatatttggggggcagggagggccctaaggaattaagggagacccaaactgcttctggattgcccagcgtcagaggttagggttcagcaggaagcaagggaacgacaggaagttgggggatgccactgaaggatgtactgggggaggaggcccgggagcctagtgcaaaaagagaactgagcctcagctatttctgctgggatgggggcaggttcctggtagagggcgtagaagctagacccggtggctcctcaagtgacaggggccatgatggagacaccttggatcgaagaggtcacagcaccctcctctttcttcctccctacccccagctgagtaagaagtacggaccggtgttcaccatctacctgggaccctggcggcctgtggtggtcctggttgggcaggaggctgtgcgggaggccctgggaggtcaggctgaggagttcagcggccggggaaccgtagcgatgctggaagggacttttgatggccatggtaagtcaagggctgctaggccctccgctcacagcctgccaccacttactggtgtgtgacctttgcacatggcttagtccctctgttgcctcatctgtcaaatggagtgataacagtgcccatcagccgggtgcagtggctagtgcctgaaatcccaacactttgggaggcggaggtgggtggatcacttgaggtcaggagttcgagaccagcctggccaacatggtgaaaccctgtctctactaaaaatataaaaattagctgggcatggtggtgcgtacctgtaatcccagatacttgggaggttgaggcaggagaatcgcttgaacccgggaggcagatgttgcagtgaaccaagactgtgccactgcactccagtctgggcaacagagtgagcctccatctcaaacaaacaaacaaaaagcagtgcccatcatgtaggattgagtgattgagtgaggactgagccttgtgcaaagtgagcactcactaatcaccaggttgtagtatcagtgataaccatcaatgatccaggtaaagccctgagggttcagaaagatgccggagcgctttcaaggtgctggggattggtgggcaagccctcgaataatagaaacagttctctgtattacaacagaaagcaggaggcccatgctgggtgctgccaggaactcagtagtaactaagacagcaccggtgctgcttccccagcgcacctaggccagtggggaaacagactcaccacacagtcccagcccagagtggtcagggccaagatggggaagcacggggagaaaggtcagggtgggatggggaggggtcagggcaagaggggtcagggccaggctgagggaagccctgggactgtaggaatttagaggaggtacctgacccggcatgtttggtgagggagcttcaggaagtcttcctggaagagaggctgtcggagctgagactcataagatgagtggggagggtgttccaggcagaaagaccagcacctacaaaagcatgactttgagagaagcattcatccattcaactgatgaattttcagactgggcacgctggctcatgcctgtaatcccagcactttggaaggctgaatggggaggatgacttgagcctaggcatttgtgacaagcctgggcaacatggtgagaccctgcctccacaaaacaaacaaacaaacaaaaaatcattatacctggtaccatgggtaccaggtacatagaaatgactcaggcagatatggtgtcctctcctactgtgggagaggcgggcttatactgcagtaagacaatagagggagggaatataatcctaaaatgagaggtacagatttgagagcaaacacagggcacaggcatatgtacgagggtaaagagggaatcagggaaggcttctcagagaaggtgacatttaagccgggacatgaaggatgaacgagttagttcaccaaggatgggatggaaaggggtgagagtgatggaggcagagggaactgcaggatcataggcctagacaggggatcctgacgcccttgaggaagtgagagaagaccagcgcagtcgtagtgggttaagtaacaaagctgagaagccagggaaatccctggtcatgcagggcctgtgagtcacgtcagagtgtttgggcttttgtttttcctgggagcagtcgattttaagcagggaacagctgtattcagagttgggaagatcctgtggttgctgcctgaaggggatgaaactggaggctaggagcccagggtgatagggaggatccagggtgatggggaggctgggaggtccgcggtgatggaccagggctggggccaggggatggggaggaaggagtaattgggagaggcctggggctctggccgaggaatggatggtgggctgaaacagggagaggagagatgcttaggccactttggaacacagtagggcaaggacaggagacacccaaggggaagtgcccaagagaccacgacaggctggcattggacagggaaggtctgtctggagcaggtgtcttggataagggaggaaaatggtgcagttccatcctcctccctctctgttcaacctctaaactacatggggcacaggacccagtgggactccataaatgatgggatgggtggatggaaggaaggaaggaggaaacaactcttcattcatcctggttatttacagaacaggccaggtgcggtgctcacgcttgccattctagcactttgggaggctgaggtgggtggattacctcaggtcaggagttcaagaccagcctagacaacgtagagaaaccccatctctactgaagatataaaattagctgggcgtagtggcatatgcctgtaatcccagctagtcgggaagctgaggcaggagaatcgcttgaacccgagaggcagaggttgcggtgagctgagatcgtgccattgcactccagcctgggtgacaaagcaagacctcgtctcaataataataataattacaaaacagaaggagcctgggtcatcccagctacctacttttcaggagaatgtactcccttacccaagggcaaaggatgggagaaccagtttgattatgcatttattgagcacctactgagtcctcatccctgggctaggctggaatggactcagatggagcctgaagagtccccctcagggaacctcactagaaagaaggaggaatcggccgggcgcggtggctcacgcctgtaatcccaacactttgggaggctgaggtgggtggatcacaaggtcaggagatcgagaccatcctggctaacacagtgaaaccccatctctactaaaaatacaaaaaatgagccaggcatggtggcgggcgcctgtagtcccagctactcaggaggctgaggcaggagaattgcttgaacccgggaggcagaggttgcagtgagacgagatcacgccactgcactccagcctgggcaacagagcgagattccgtctcaaaaaaaaaaagaaagaaaggaagaagggggaatgggggagaggggccggtccctttttgagtctagccttctgcgcaggggttttcttctccaacggggagcggtggaggcagctgaggaagtttaccatgcttgctctgcgggacctgggcatggggaagcgagaaggcgaggagctgatccaggcggaggcccggtgtctggtggagacattccaggggacagaaggtcagcatggcggggtcaccccagggtctccagccgagtgaaagggaaaactctcctactgtggctgggggtggccccaacccaggtcctggaatgggcaggaggggaagccttgaactctagggctggcctgggggttctgttcactgccaccttctgtctctgtcccactgtctctccgaggctgtcatgacatctctctgtgtgtctctggtgctatcatcccattcttcctgggtctccatctctctctctgtctcttttctttctctctcctttcctctattttttgggccctcagtctatctctgtttctgtctccctgtctgtgtgatggtcactctgtttctttctccctgtctgtttctctgtccctatctgtctgtatccttctttgcctgtttagctctctccctgcgctgtccatccatctttccctgcctccctgtctctctctggttgggttcagctccaacctgctcccctctgcctggctccatcacagcctacctccctgcccccattccccccaggacgcccattcgatccctccctgctgctggcccaggccacctccaacgtagtctgctccctcctctttggcctccgcttctcctatgaggataaggagttccaggccgtggtccgggcagctggtggtaccctgctgggagtcagctcccaggggggtcaggtgagtgggtgggacccctctccaactaccttccctgaaggttcctgccaaggtcccatgagaactagctgcccttctccccacagacctacgagatgttctcctggttcctgcggcccctgccaggcccccacaagcagctcctccaccacgtcagcaccttggctgccttcacagtccggcaggtgcagcagcaccaggggaacctggatgcttcgggccccgcacgtgaccttgtcgatgccttcctgctgaagatggcacaggtgtgggaagggtgcagggaccccctctctgaatgggcgtggtgacctggcaggtccccagccaggtgtccctggggacctcaattgggttcctctctctttctctctctgcatgtctctgtgagtatgagtgtctctgtgcatgtgtgtgcatcccttctctgcacatctgtctgtccctttcagggcgttgctctcactgcctctcccgcccccgacctgggcatttgtgccgggctgtctgtctctccagcatctctcctctttctccctcccacctcggcccttgtgttcaggccccatgcccagggtcctacaccagcaatccccaggatcacttcatcccatcccctgcagcctccccagacttttatgtaaattcacaattttatgtgaattatggtcatttattaggaagccttgcaatatcaagttatgttaataaagtccactttattaattatataagaacaatatttcttttccttttttttttcttttctttttaaagagacaggatctctttctgttgcccaggctagagtacagttgcaaaatcatagctcactgcaaccttgaactcctgggctcaagcaatcctcctgcctcgggctcctgagtagctgggacaacaggtgtgcaccaccacacctggctaaattttttttttttctttgtagagatagactctcactatgttacccaggctggtcttgaattcctgggctcatgtaatcctcctgctgccttgaactcccaaagtgctgggactataggcataagacatcatgcccggtcgggcacagtggctcatgcctgtaatctcaggactttgggaggccgagacgggcggatcacctgaggtcgggagttcgagaccagcctgaccaacatggagaaaccccatctctactaaaaaaaaaaatacaaaattagccggacgtggtggcacatgcctgtaatcccagctactagggaggctgaggcaggagaatcgcttgaacccgggaggcttaggttgcggtgagctgagattgcaccattgcactccagcctgggcaacaagagcgaaattccatctcaaaaaaaaaaaaaaagaaaaaaagaaaaaagacaccatgccctataagtaaactagaattaaggtgactcctaaggaaataaatagtttttaactgtacgaacttttggaagaatggggccaattctttaattaaatgcagcctccctgtttgtggagaaagaaaaatttttcttaaccctattgccccatttcttttctcttttattgaatattttttagttttaactatagtaaaatacacataacgtttaccatcttaaccatttttaggtatacagtacagtagtgttcagtacattcatactgttatgcaatcagtctccagaactcttcatgttgcaaagctgaaactctatacccattaaacaactgcctgttcctccctcctccaacccctggcaatcacctttttttttttgagatgaagtctcactctgtcacccaggctagagtgcggtggctcgatctcggctcactgcaagctccgcctcccgggttcatgccattctcctgcctcagtctcccaagcagctgggactacaggtgcccgtcaccacgcctggctaattttttgtatttttagtagagatggagtttcatcgtgttagccaggctgatctcaaactcctggcctcaagtgatccacccgcctcggcctcccaaagtgctgggactacaggcgtgagccactgtgcctggccaggaagtagactcttgatattagttctctctggttgaaatgtttttaaaaatgaaagagaatgactaataacaaaaacacagaaagttataaggattgatgaagatgtggagactttgaaacccatgtataccattggtgggaatgtgaaacgacgcagccctgtggaaaatggtacagcagttacctgaggtcaggagtttgaaaccaacctggccaacatgcagaaaccccgtctccattaaatgtacaaaaattagccaggcatggtggtgcgcacctgtaatcccagctactcgggaggctgaggcaggagaattgcttgaacccaggaggcggaggttgcagtgagccgagatcgtgccactgcactcagcctgggcaacaaagcaagactctgtctcaaaaaaaaaaagtctacttcccaaccttcccaaaaatttatctaaaccccgtgacaaaactttaacttgtgtttccgaccccaggcttggctgttctggacatttacttcccaaaggctgtgttctctcagcccctctgcctggtttctttcaggaggaacaaaacccaggcacagaattcaccaacaagaacatgctgatgacagtcatttatttgctgtttgctgggacgatgacggtcagcaccacggtcggctataccctcctgctcctgatgaaataccctcatgtccaaagtaagagccttttccacttgccaggccttgggaacagaagtcagggttctaggctgagcaaggtggctcacgcctataatcccagcactttgggaggctgaggcgggctgatcacttgagaataggagtttaagaccagcctggccaacacagtgaaaccccatctctactgaaaatacaaaaattagcgggtgtggtggcatgcacttgtaatcccagcactcaggtggctgaggagtgagaattgtttgagcccaggaggtagaagttgcagtgagctgacatcacaccactgcactccagcctgggcgacagagcgagacactgtttcaaaaaaaaaaaagtgagaattctagagggaagagtgggtgggccaagcagacaggctgagttagatctttgaggcatcgatgggcatggcgtttgagatgtcgaggagccagaagaggttcaggagttgctgattgcagtatgaggcacagtgaaaaacaaggcaggtgtctgtgggcctcatcgccttagtgatacattaggtgccttatcctgagccatggggagcaatgcaatgactttgagcaggggagggcaaggtcaaattggttttttatttttattttttttactttttgtgggggatagactctcactctgttgcccaggctggagtgcagtagtgcgatctcggcccactgcaacctccggcctcctgggttcaagcaattctcctgcctcagcctcccaagtagctaggattacaagcatgcaccaccacgcccagctaacttttgtatgtttagtagagacagggtttccccatgttggccaggctggtcccgaactcctgacctcaagtgatctgcccacctcagccttgcaaagtgctgggattacaggcatgagccaaggcacccagcccaactctagcattttcgggtcaggcagctgctgtgggccatggggacgggctgacctggaatatgggagtggaggtcctggtagtgttgcaggagtggaattagctgtgacttccagcagtgacttgggttctctgagtctgtttcctcacctaggaaatggggatggataacaatatgtacctcacaagggtgctatgggaattaagaaagtatggatgagccaggcatggtggcttatacctgtaatcccagcactttgggaggctgaggtgggaggatcacttgaggctaggagttcaagatcagcctgggcagcataatgaggccctgtctctaccgaaaatagaaaaattagctgggtgtggtggtgcgtgcctgtggtcatagctactcaggagactgaggtggaaggatcacctgagcccaggaggtgagatgaaggctattacagtgagccgtcattgtactactgcaccagcctgggcaacagagtaagaccctgtctcaaaaaaaaaagagagagagagaaggccaggtacggtggctcacatctgtaatcccagcactttgggaggccaaggcaggtggatcacctgaggtcaggagttcgagaccagcctcgctaacatggtgaaaccctgtctctattgaaaatacaaaaatgagctgggcatgatggcaggcgtctgtagtcccagctactcgggaggctgaggtgggagaatctcctgaacccgggaggcggagttgcagcaagccaggatcgcgccactgcactccagcctgggtggcagagcgtgtaatcccagctactcaggaggctgaggcgggagaatcgcttgaatccgggaggcagaggttgtggtgagccaagatcgcaccattgcactccagcctgggcaacaagagcaaaactccgttgcaaaaaaaaataataataataaaatgaaataaaataaaataaaataagagagagagaagatagatggaacacccaacacacaagatgtgtggtctttgggctcagtgagggctgggggaccactcctccccacctgtcagcctcaccccaaactacagctatgcaagcagatgggcttctgagaggaggatccctgggccctacccccgtctgactcctgccctcctcttgcttgcagagtgggtacgtgaggagctgaatcgggagctgggggctggccaggcaccaagcctaggggaccgtacccgcctcccttacaccgacgcggttctgcatgaggcgcagcggctgctggcgctggtgcccatgggaataccccgcaccctcatgcggaccacccgcttccgagggtacaccctgccccaggtgggtatgcgtatggctgccacccatggttctctgcctcggggcctgagcccgggtggtttgctgtcagtgtctccctgactttttcttgatcttagtgtctctctctctctctctctgtctttatctccctctctttctctgtctctgtcttcctcctccactcctacccccctgcatctttcttctccttctttctctgacaccccctccctttctgcatatattttttttctttttttgagacagagtctcgcactgtcgcccgggctggagtgcaatggcgtgatctcagctcactgcaacctccgcctcccaggttcaagtgattctcctgcctcagcctcctgagtagctgggattacaggtgcccaccaccacgcccagctaattttttgtatttttagtagacacggggtttcattatgttggtcaggctggtcttgaactcctgacctcgtgatctgcccgcttcggcctcccaaagtgctgggattacaggcgtgagccaccgcacccagccatgctttctgcatcttttaactctttctgtttctttttggtttgtgttttcttcccctttgactctatctctgggccccatctgccccacagatctcccaattctacctccttccaaggtggttgggacaatcgaatgaggtaacatacagagaagcagtttgaaaactgaggagcaagtccaggactaagggaagccctcttgacccttagcccctgctgcagacacattctctcctctgtctctctctctcaatctcagtgcccttcactggagagcagctccgatgcagaaccaaaagggggcgatgtttccccagaaaccccagcagtttatgcaagcagctccctcctccaccttcactgcagaatcaaacctatggcagttaggatccagtgctgctatgctgctattttctttttcttcttcttctttttttttttttttttttttccgagatggagtctcgctctgttgcccaggctggagtgcactggcgtgatctcggctcactgcaacctccgcctcccaggttcaagcaattctcttgcctcagcctcctgggtagctgggattacaggtgtatgccaccacacccggctaatttttgtctttttagtagagatgggttttcaccatgttggtcaggctggtctcaaactcctgacctcatgaactgcctgcctcggcctcctaaagtgctgggattacaggcgtgagccactgcacctggcctaccccctcctgttttgtagatggggccttgggcaaatcacttccccccctgaacctcaatatatccctcctctacattagaaacaataatagtatcaacttgaagctgtaagataatgcttgtaaaacaaacaccaactcaactcttgggaaccggtcctgtgtaccaggcagcaacaatttaatgatgataatgacaggtatccaggcttgaggacctgctctgcaccaggggttattctgagtgctttgcatatctattatctcatttaatctttaaagcaaccctataccattatcatgcccatcttacagataaggaaactgagagcttgaaaagtttttagaggatttgccaaggtcccccagcctgcaaatagtagattcaagatttgaactcagagactatgccttaactactattctttgcctttctttctttctttttttctttctttctttctttctttctttctttctttctttctctctctctctttctttctctctttctttctttctttctctctctctctctttctttcttttctttttctttctctctctctctctttcttcctttcttccttcctcccttcctcccttcctcccttcctgtcttcctctctttctctctttctttcttgacagggtctctctttgtctcccaggctggggtgcagtggtacaagcatagctcacagcagccttgaactcctaggctcaagtgatcctcccacgtcagcctcctgagcagctgggacaacgggctcataccaccatgcctggctaattttttaatttttcctagagacaaggtcttgttatattgcccaggctggtctcaaactcctgggctcaaatgcttctctcacctcagcctcccacgtggctgggattacaggcatgagccactgcacgccactcaacactccacaaatgttgatgccattaggttttgtgaactagtgtccctggcacccgagacttgtactccacactcgaggaccaaatggactggggtgggaaggggtttatagtttcattattatttcccctcagggcacggaggtcttccccctccttggctccatcctgcatgaccccaacatcttcaagcacccagaagagttcaacccagaccgtttcctggatgcagatggacggttcaggaagcatgaggcgttcctgcccttctccttaggtatctgctgcagccctgggtatcacaagcaggtgctggcgaactccaggcatctgtgccagctgggggcacccttctgcaccctgggcttactgttggctcctccacctgctgttccccccgtgggcctgggtgtgaggaatactgactcagccctctctctctctctctcctcaccagggaagcgtgtctgccttggagagggcctggcaaaagcggagctcttcctcttcttcaccaccatcctacaagccttctccctggagagcccgtgcccgccggacaccctgagcctcaagcccaccgtcagtggccttttcaacattcccccagccttccagctgcaagtccgtcccactgaccttcactccaccacgcagaccagatgaaggaaggcaacttggaagtggtgggtgcccaggacggtgcctccagcctcaacagtgggcatggacagggttaatgtctccagagtgtacactgcaggcagccacatttacacgcctgcagttgttttccggagtctgtcccacggcccacacgctcacttgactcatgctgctaagatgcacaaccgcacacccatacacaactacaagggccacaaagcaactgctgggttagctttccacagacataaatatagtccatctgcaatcacaagcacatagccaggtaacccaccaactcccctggatctgcagcccacacgtgggagtctggctgtcaccttcacaagccacagaaacggccacacatgttcacagctcacacgccctctccattcatcgaacttctcagtgtccctgtccctggtgcctggcacagggaacagcatgccccctccggggtcatgccacccagagactgtcgctgtctatggccccaactcatgctccctctcttggctacaccactctcccagcctgtgaccaccgatgtccacacacccccaaccacttgtccacacagctacccacgtacgacatcgtcctggctccccagagtatcttcccactgagacacgccgcccccacagaggcacagtccccagccacctctgcaactgcagccctcagtcacccctttttaagcaccctgattctaccaaatgcaaacacatctgggtctgcgattatgcacagagactttggacatacgaggaccctcagaccggaggaacacctgcccaaccccaacacgtgcttatgtaaccacgtggaaagcggcccctgctgcccctccacacacacatacacactcactgatctacagcccctgttcggcgtcagagtccccactagacccagtggaaggggttagagaccaagtaggggccagtttccaattcaccctgtcagggagtgagccggatctgacgttccttgtgacttaagggtccggcttgggaattaaagtttgtttctggcctttagcctactgcgtgtgtgacccgtgtcagtcactgtgagtaaggggtggggacaggggagtccacccctcccctgaggctgggcgggagctgaaaaacatggccaccgcccaccctggctgttgacatcaggaccagatgtggagctgggaggaggggcagggctggtgacgccctgggcctcatttccaaaaagggccaaggtgtccggcggtgggaagtgggcaaggagggggtaacccaagctggactgtggaccttgggggcttcctcagccagggagagcctgaagccaactagatccagaccctagagactcttcaaacttgagtacaggaactagcttgcaacacagactctaagcccactcccatttcttccaccctttttctcttgcctccccttcacaaggaaaccagaggcatttgtaaatttcctttctttttttttttttttttttttttgagacggagtctcactctgtcacccaggctggagtgcagtggtgtgatcttggctcactgcagcctccgcctccgggttcaagccattctcctgcctcagcctcccaagtagctgggattacaggtgtgtgccaccacgcccagctaatttttgtatttttagtagagatggggtttcaccatgttggccaggctggtctcgaactcctgacctcagatgatctgccagtctcggcctcccaaaatgctgggattacaggcgtgagtcgctactagataaatttcttatctagcaaagaagtttgcaaacatacgcaaaagtagaaagatacaatgagcccccaggtgcccatcacccagcctcatttcaatagtcatcaactttctgcagcttttacttcatctatatccttttctgcctctttttttttttttttattttgagatagggttttgctttgttgcccaagctggggtgcagtagcatgatctcatagttcactgtggcttcagactcctaggctcaagtgatcctcccgcctcggcctccaagcagctgggactacagatgcgtgccaccacacccagctaaatttcttatttttattttctatagagaaagtctcactatacagcctgtgctggtctcaaattccaggcctcaagagtttccatcccagcctcccaaagtgctgggattataggcgtgagtcactgcaccctgccctgatatttttattttatctattgctttttatttacttatttatcttttatttttgagacagagtctcactctgttgcccatgctggagtgcagtggcatcatctcggctcactgtaacctccgcctcttaggttcaagcagttctcctgccttgacctcccgagtagctggaattacaggtgcctgccaccaagcctggctaatttttttatttgtagtagagatggggttttgccatgttgaccaggctggtctcgaactcctgacctcaggtgatctgcccaccttggcctcccaaagtgctgagattactggtatgagccaccgtgcctggccacctattgctttttaaagattatttttttattattattatttttttatttgagatggagtttcgctattgttgcccaggctggagtgcaatggcgtgatctcagctcaccgcaacctccgcctcccaggttcaagcgattctcctgcctcagcatccctagtagctgggattacaggcatgcaccaccatgtccagctaattttgtatttttagtagagacgaggtttctccaggttggtcaggctggtctcaaactcccaacctcaggtgatccgcccatctcggcctcccaaagtgctgggattacaggtgtgagccaccgcgcctggccttaaagattattttaaggcaaattacagaaagcaatttaatgcacatttctgagagttaaagatatttttgcccttgacattttatgaggacagttttcaaacatgcagcaaagttgagggaattgtacaaggaacaccttgtgcacttcctgggttctcccactagcactttgctacactgctttctgacgtttctacacacctgaccaccagctcaggatttatttatttatctatttattttgagacagagttttgctcttgttgcccagactggagtgcaatggtgtgatctcggctcacggcaacctccacctcctgggttcaagtgattcttctgcctcagcctcccaaatagccgggattacaggcatgcgccaccacgcgtggctaatttttgtgtttttagtagagacgggatttctccatattggtcaagctggcctcaaactcccgacctcatgtgatctgcctgcctctgcctcccaaagtgctgggactacaggtgtgagccactgcgcctggccaattttttttttttttagacgaagtctcactctgtcacccaacctggagtgcagtggcatgatcttggctcactgcagcctccacctcccaggttcaagcgattctcctgcctcagcctcctgagtaactgggattaccagcgagcgcctggttaatttttgtttttttagtacagatggggtttcatcgtgttggccaggtgtgagccaccatgcccagaccagttcaggactttttaggcatttccgagtaaacgcacgtatcagttcatcaaaaaacttaagcaatgcatatatcattagcgaaagcttcttttttaaaaaaaaaaatccaagatgttaacactttattggcttaagttctatagagatagcacaaaacagagaataatagagaactgaaagatgagattggaatcagatcctaactttgccacctcctagctggtcacaccttgactgaggctttaccatcttaaagccttaataaattgataagatgtaagaaatgtgggccaggcacagtggctcacacctgtaacccttgttgagggaccgaggtgggaggattgcttgagcccaagggttcaagaccagcctggccaaaagggcaagactctgattcaagggaaaaaaaaaaaatccagaaagaaatgtgaaaactttcagaacttcgtaggaaataaatatctgctaagttcttcttggatttaatattattactattttttatatgtcggtgcactttgaaaaggaatgaagtttaaggttttcttcttttaaaagtaaggcaatggggccaggtgcggtggctcacgcctttaatcccagcactttggggaggctgaggcaggcagatcacttgaggtcaggagttcgagagcagcctggacaacatggtgaaacgcggtctttaccaaagatacaaaaactagccaggcatgatggcaggcacctgtaatcccagctactcaggaggctgagacaggagaattgcttgaacccagcaggcagaggttgcagtgagccaggactgtgccacagcactccagcctgggtgacagagtaagactccatctcaaaaaaataaaaaattaaattaaggcaatgatttgcattcctttgcagtcaaaattcacattcagggaaatctggaatcaggtagaaatacaagcagacctatttatttaaagaggtgggctatagccgggcatggtggcgggcacctgtagtcccagctacttaggaggctgaggcaggagaatggtgtgaacccgggaggcagagcttgcagtgagccgagatcacaccactgcactccagcctaagcgacagagtgagactctgcctcaaaaaaaaaatttttttttttaaataataaaaaaaataataaagaggcgggctgggcacggtggctcacgcctgtaatcccagcactttgggaggctgaggtgggcggatcacgaggtcaggagatcgagaccatcctggttaacatggtgaaaccccgtctctactaaaaatacaaaaaagtagccaggcgtggtggtgggcgcctgtagtcccagctactgaggcaggagagtggtgtgaacccgggaggcagagcttgcagtgagctgagatagtgccactgcactccagcctgggcgacaaggcaagactctgtctcaaaaataaataaataaataaatacataaatacataaataaataaataaagaggcatgtcggcctgggcatggtggcttatacctataatcttagcactttggtaggctgaggtaggagaatcgcttgagcctaggagcttgagaccagcctggacaatatagtgagaccccatctgtacaaaaaagaaaacaaacaaacaaacaaaggcacagactttgcactgtatcaatataaaagttgacatcaggatgatttcagtagcaagtaaaaaaatacagaaactcaaaatggcttaaacaataaagaagaattattggtccccaaagtaaaaatggaatcggtgtggtcttcaaatagttttctgcgtgtgttaaaatatacacataataatattattttaaccatttagaagtatacaatttagtagcattaaatatattcgcaatgggccaggcgtggtggctcacgcctgtaatcccatcactttgggaggccgagacaggcggatcacctgaggtagggagttcgagaccagcctgaccaacatagagaaaccccctctctactaaaaatacaaaattagtcgagcgtgggggtacatgcctgtaatcccagctactcaggaggctcaggcaggagaattgcttgaacccggcaggtggaggttgcagtgagcaacctgcactccagcctgggcaacaagagtgaaactctgtctcaaaaaaaaaacaaaaaaaatattcacaatgttgtataaccatcacaactatttgtgcccaaaatgtttccattgtttccaacaaaaactacccattaaataataactctggctgggcgtggtggctcacacctgtaatctcagcactttgtgagtccaaggcaggcggatctcttaagcccaagagttcaagaccagcctgggcaacatagggaaacgctatctctacaaaaagtgagactggtgtggtggtgcacacttgtagtcccagttactcaggaggctgaggtgggaggatcacctgagcctgggaggacaaggctgcagtgggctttgatcacaccactgcaccccagcctgggtgacagagtgagcccatctcaaacaacaacaacaaaaaacacaataactccccattaaagtttattttttaaaagtcaaaactacaatactcattttcacacctatcacaacgaacaattctgttattcattcattgtattcatagtgattcatagtgttcacattttcacatttctctgatagtctcataaatgtcctttttttttttttttgagatggagtctcgctctgttgcccaggctggagtgtagtggcatgatctcggctcactgcaacctccgcctccggggttcaagtgattctcctgccttagcctcccgagctcccaagtagctgagactaccagtgtgcgccaccacacctggctaatttttgtatttttagtagagatggagtttcaccacgttggtcaggctggcctggaactcctgatctgctaatttgcctgccttggcctcccaacatgctgggattacaggtgtgagccactgcacctggcctgtcctttaaaaaaaaaaaaaaaaaaagataggctggagtgcagtggcacaatctctgctcactgcaacctctgcttcccaggctcaagtgatcctctcgtctcagcctcctgagtagctgcgattataggcacacaccaccacacctggctaatttaaaaaaaaatttttttttttttgtagagatgggatttcattatgtttcacaggctggcctcaaactcttgggctcaagcaatcctctctccttggcctcccaaagtgctggaatattaatgtcttttaaaattggtttgttcaaatcagaatctgaattttgtttgaaatgtctattaagtttttaaaatctgtaactgttacccatccttttacatgccattaatttcttgaatcaactgggtctttggccctgtgcaatttttcacattctggattaggctggcagcatctttgtggtgctgttcaagatgtccttctgttcccaggatctcctgtaaactgggaattagatcagattcaggctcattctggcaagagatcctccctggaggtgctgggccacatcttgttgcatcacattgcaaaattgatggtcccatgtgtagtgacgcttaaaattaacgtgtccaggtcctgatccctctgttagaaactctgccaaccagccaggtgcacagtgactcacgcctgtaatcccagcactttggaaggccgagacgggaggatctcttgagcctaggagtgcaaaaccagcccagataacaaagtgagacactgtctctacgaaaaacttaaaaaattagccagttattgtggcacacacctgtggtcccagctacttgggaggctgaagtgggaggatcacttgagcctaggaggtcgaggctgcagtgagctgtgttcatgccactgcactccagcctgggcaacagaggaagaacgtatcaacctttcacttgccttagcagagggatcctttaaaactagatcagatggtatcactcctgttcatatcatagttaaaacaaagaccaaagtttttgccaggccaaggcttgccctcaccccaagcccaccttccctctactcctgcccccaactgttccagccacaaacaggcctcctcacagttcttcacatgcctgccacacgcctgcctctgggcctttgcactggctattccctccacctggaatgctgttccccacagggctcacttgctaatttacttcagatctcaatcatagcctgagagaagccttcccccatcatcctctctaaaacagcacccacacctctcactatcccctgctttcttttcctttttctttttttgtttttgtttgtttgtttgtttgtttgttttttgagatggagttttgctctgtcgcccaggttggagtgcaatgaagcgatcttggctcaaagcaacctcctccattggggttcaagtgattctcctgcctcagcctcccaagtagctgggattacaggtgtgtaccaccacacccagataattttgggtttttaaaattttttttttaagacggaatcctgctctgtcacccaggctgtagtgcagtggcgtgatctcggctcacttcctgcaacctctgcctactgcattcaagcaattctcctgcctcagcctcccgagtagctgggactacaggtgcgcaccaccacaccaagataatttttgtatttttagtagagacagggtttcaccatgttggccaggctggtctcaaactcgtgaccttgtgatccgcctgtctcagcctcccaaagtgctgggattacaggcgtgaaccacagtgcctgactaatttttgtatttttagtagagatgggtttcaccatgttggccaggctggtctcaagctcctgacctcaggtgatccgcccacctcggcctcccaaagtgctgggattataggcatgagccactgtgcctggcccttgctttatttttcttcactgcacatcttgcaacatgataagtatttatgtgagtgttatttctcttcccctttgaatggaaactccagtaggatgtggacttgtcttgctcattgtagaaaccccaccccagcaccacctgtccatcttttcttttcttttttttttagagatagggtctcactctgtcatccagactggaatgcattggcaccatcatagcttgttgcagcctcaaactcctgggctcaagcgatcctcctgcctcagtctccccaagtagccaagactatgtgtgcaagaacacctggctaattaaaaaaattttttggaagacacagggtctggctatgttgccaggctggtcttaaacccctagcctcaagcaaccctccaacctgggcctcctaaagtgtgggattataggtgcgacccactgcacccagccccgaatctttttctcttttttggggggggaggggggatggtctctgctgtcacccaggctggagtgcagtggcataatcctggctcactgcaacctccacctcccaggttcaagagattatcctgcctcagcctcccaagtaactgggactacaggtgcacaccaccatgcctggctaattttttttgtatttttagtagagatggggttttaaaatgttggcaaggctagtctcgcgctcctgacctcaaatgatccacccacccgggcctcccaaagtgctgggattacagatgtgagccaccaagcccggcccccgtctcattttttaaaatgcatttcaaagtaaattgcaggcacatagcaggtgctcagcaaatagttcatatagttcatgagtgaatgaattcacaggttcaagtaggccatcaaccagctgggtccactgagccctagggtgggcaggggccccccaacatatctaaacaagtgaacagatctttgcacatatttgcacccctcaaaaatgccacaataggccgagcgtggtggctcacacctgtaatcccagaactttgggaggccgaggcaggcacatcacctgaggtcaggagtttgagaccagcctggccaacatggtgaaaccccatttctactatgaatacaaaaattagccaggcattacggtagttcctgcagtcccagctactcaggaggctgaggcaggagaatctcttgtacctgggagttggagtttgcagtgagcccggattgcgccactgcactccagcctgggtgacagcgagagaccatctccccaaccaaaaagaaaaaaagagatcgggctgggtgcagtggatcacacagtgggtcacgcagtgggtcacgcctataatcccatactttaggaggcccaggtggaatgattggccaggcttacctcgtgatccactcgcctcggcctcccaaagtgctgggattacaggcttgagcagccacgtctggcccctaaaacagttttttaaaattagccaggtgtgcttgcacacatagtcttggctactcggggaggctgaggcaggagggtcacataagcccaggagtttgaggcttcagcaagctatgatggcgccactgcattccagtctggatgacagagcaagaagacagaatgcttgaactgggaagtggagtttgcagtctgctaagatacagccaccgcactccagcctgggcgacagagtgagactctgtctcaagaaaaaaaaaatgccacaataaggaattgtcccctttatggcaggccttttacagggcggtgaagatgcagcagttcccaaaatatacccagtcccttcccccgcagagcccacaggccagtgggaggagacagatgtgagacacataatcatgccaataaatatataatgacaacccaggcaaagtgttgccaaggaaagggacagcatgttgggagtgaacaatatgaggacctagattgggctgggggggccaggcagtgatgcgatggagaagggatgatagagttggggacaaagtgctgcaggaggttgctccaagtcctctgagggggctctttgggtgagaaagcgagagaagcctggggaggcgaggggagggtcacagaaacataaggagtttagggttctgctgaaaggtttggggcagaggtgggaaagggtttggtttgagattgggaagaagccttctgactgttgagtgggagacaggttggaaggagcaacagaagccagcagcccatggccgggcacagtgacccacgcctgtaatcccagccctttgggaggccgaggcgggcagatcacgagttcaggagttccagaccagcctggccaacatggtgaaaccccgtctctaccaaaaatacaaaaattaacctggcatggtggtgcacacctgtaatcccagcaactcaggaagctgaggtgggaggatcacttgaacccaggagatggaggttgcagtgagccgagatcgagccattgcactccagcctgggcaacaaagcaagactgggtctcaaaaaaaaaaaaaaaaaaaaagacacagcccagggagacaacggtgaagggccctaagtggccagtgacaaggagctgggagcttgccctgagggcagcaggaggccatgggcaagcagagaagggacagggtaggatttgactttcagaaacagtcctctggttgctaaatgggagaaaggagtgacagtagaggcaggagaaggcaggatcagacgggggtgctgggaaggggcaggtagaagagacatcaggaggccaaacagataggactttatgatgcaccgtaggtataccagtacccaaacacaggtggccaagagcagagggatagacgcccagcctcctcctcacagacatccaggcatgcagagccctccacgtgccaaacacacagggccgaggaatggaagtgcagcagagccgatacgcaggcagcagatctgcaataaccaggacacacagtcccaccagaaggagagagcagtggaatgatcagggctcactgcagcctcgatctcttggactcaagcgttcctctcactccagcctccctagtagctgggaccacaggcacacgccatgatacctggttaagttttaatttttaaacttcttgtagagatgggggtctcagtgcattgaccagtctggtctcgaactcctgggctcaagcgatcctcccaccttggcctcccaaagtgctgggattacaggagtgagttactgtgcccggccaacaactattcttattcccattttacagatggacaaactgaggctcaggaggccagtcacttgcctgtagcccacagttagtggtagcactgggattccaacttgggtccccttcatgtcgcctgtatttggtgtcccatttaggcgtccatgcaggttttggcgtgtctgaagatctgtgtctccccaagtaagtgtcccccatggatgcccacccagccgtgtcctcctgtctctgaggtttctccaggaatcgagctcctggcctggcttgtctgagtgtgtctgtgggccagtagcatgcccctgcccgtctgggtccctctgcgtgtctctgcttgtcctagcctgtgtgtgtcagtgacgtctaagagtgtgtgtgcgtgcgtgcgtgcgtgcgtgtgtgtgtgtgtgtgtgtgtccttgtccgaggagccgagagagtgagggggaatgaagggccaaggaggcctggctggggctgggctgggggtggaggcggggagaggggcgtcacggcctgagctgagaggggagtggagttctggaggaatgtttaccagacacagagcccagagggacagcgcccagagcccggatagagagacacggcctcactggctcaggacagggggcacagccaccagggtccccttccccctcctcagctccctccctggcccctttaagaaagagctgatcctctcctctcttgagttaacccctgattgtccaggtggcccctgggctctggccctggtgggcggaggcaaagggggagccaggggcggagaaagggttgcccaagtctgggagtgagggaaggaggcaggggtgctgagaaggcggctgctgggcagagccggtggcaagggcctcccctgccgctgtgccaggcaggcagtgccaaatccggggagcctggagctggggggagggccggggacagcccggccctgccccctcccccgctgggagcccaacaacttctgaggaaagtttggcacccatggcgtggcggtgccccaggatgggcagggtcccgctggcctggtgcttggcgctgtgcggctgggcgtgcatggcccccaggggtgagtgatgggggctccttggggcagggatcccctcggaggggctggggcaggggtaggaggtgggggatgatggcaggtgtggggggcctgggctggcttagggagtttccttgggaccacagaaaagggacttcaagggagggagacacagactcagagacaccaagtgcggcagagggagagaaagactgagagaggaactgaagggcaggggggacagaagagaggacccggagagacagacagacaaggagaagctgagggcaggggtgggggctggacctgagaagggggccatggggagaggggctgagctgagggtcgccaggaaggaagaaatctttccgaaggggcaccgagtcaggcagtgggatgaggagggctctggagccctgggggaaaacgcttctccctgccaacaccacccccctgacccgccacttgtccctaccccaccagtccactccatctctggggaggaggctctcactttgtctctctgtctctgcctccagctctgctatctctgtgggtctctgtttctctctctttcacagtctctgcctttatctctccctgctctctgagtctctctctctcttctcagcctccctctgtgactgtatcccccctccgcccccaccttttcttctctcttgagggctgtttcttcattttttctgtcttgccttgtatctgtgctcctctctgtctcatctcccctgcctttctctggcttctccctccgccaccacccttatctccccccaccaccacccttatctctctcccccaacccctgattcttcccctccatccaccagcaccagcgcgacctgttaagtctctagagacctaagagaggacggagggggcaggggctggccctgccaggcagtgcagggcgtgggaggctgccagatcccgagcctccttcccgacgggatggacgctagatcccagtcccttgggagggctcccgtcctcctctcagagcctccgccctccaccccactctgaggtcactctgcaactatgtcggcctaagggcctggcggggtcctggccgccggtgggcaggcaaggacagggtggaactgagggccggaaggagctggggggttcctaagctaactcttcccatctcccctccaggcacgcaggctgaagaaagtcccttcgtgggcaacccagggaatatcacaggtgcccggggactcacgggcacccttcggtgtcagctccaggttcagggagagccccccgaggtacattggcttcgggatggacagatcctggagctcgcggacagcacccagacccaggtgcccctgggtgaggatgaacaggatgactggatagtggtcagccagctcaggtgtgtggccacatccccgaatcccactcccacctccgtcacacagagggcagaaagcccacctgggtgggaaccccagtttgaccacttgtcagccgtgcggctttgagcatgtgatggaacctctaggtttcgttttcctcttctgcaaaatgagttaataataggacatacttcgtggttgtcatgagcttccagactggacaccctctttccgttctgacagaccccctcccagtgtccagctctgaccctgaacctctctgtctctcctcttgccctgtcagaatcacctccctgcagctttccgacacgggacagtaccagtgtttggtgtttctgggacatcagaccttcgtgtcccagcctggctatgttgggctggagggtgagctctggggtcaggggtcctgaggggtcagaggacatgtggcgctcataggttgtgggaagtcaggaatcctgaggggtcaaggtcaaagggtgctggaggattcaggatgaacctagcgtcatacagcctaagaatgtcagagttttgggtggtcaagaagctgggagtccatataagttatggtgccaaggctgggggattatatgttctgggtgaaaagacttcttgggggtagttggatgtcctaggcatcagacaccatcaggtcacaggaggccattctggtcttcagataaggcgtcagaggcacgcaacgtacccctgtccccacgaccccagcggtctcttttttctcatccatagaatgagatgaggatgagctgtcagacattctggaagagagacatgaggagctcagctatcgtggggggtctgacatgggaggaatcagatattggggtcacgtgtgtgttgggtatggctcaggtgccctcggggatcagataaggcaagtcaatgaccctgcagggtgggtttgctgcccaaagcctacagcatcctagtggtgagtcaggcatcttggggcctcagagggaccccagcctctaccactgcccaccccgctaggcttgccttacttcctggaggagcccgaagacaggactgtggccgccaacacccccttcaacctgagctgccaagctcagggacccccagagcccgtggacctactctggctccaggatgctgtccccctggccacggctccaggtcacggcccccagcgcagcctgcatgttccaggtgagtccggggatgtgggtcagctccgaatagggggccgggcagggctgaagtcaggagcaagggaacattgctacctctgcgtgagtgtctgactgtccttctgtccctcactgtctgtctctctcgtttctccctctgagtctgtctctgcctctctgtctctacctatcttatttctctccgtatgcctttttctgtctctttctgtctcttggtgtgtgtgtctttctgtctctctttgtatgtgtctctctctctgtctctctgcttctctctccctccattcaccccggcctctctctgaatagaattctttgtcctgggtttcctctgagctgttccatggctcgagtgcgtgtgggcctggtgcccctttgtcagcccttgacccaagcagggcaccggaatcaaccgtgccctcctctcctccgcctccctccacaaccggcccacctcctgccctaacaagcctgctggcctcagtcaaagggaggatgtccagcccggtccccactggggagatggaacccaaagaagagagagcaggaagaaagtaggagacagaggctgggcgtggtggctcacgcctgtaatcccagcactttgggaggctgaggcgggcggatcacgaggtcaggagatcaagaccatcctggctaacacggtgaaaccccatctctactaaaaatacaaaaaattagccgggcgtggtggcgggcgcctgtagtcccagctactcgggaggctgaggcaggagaatggcaggaacccgagaggcggagcttgcagtgagccgagattgcgccactgcactccagcctgggcgacagggcgagactccatctcaaaagaaaaaaaaaaaaaaagaaagtgggagacagagagagatagaatgacatacactggaagggacaggccacagtgacccaagatgaacatagacaggacagagaggccgggcatggtggctcacgcctgtaatcccagcactttgggaggctgaggcaggtggatcacttgaggctgggagttcgagaccagcctggccaacatgacaaaactccatctttaccaaaaatacaaaaattagccaggcgtggtgacgggcatctgtagtcccagctacttgggaggctgaggcaggagaatcgcttgaacccgggagatggaggttgcagtgagccgagatcacaccactgcactccagcctgggtgacagagcaagactctgtctcaaaacgaaaaacaaaacaaaatgaaagacaggacagggaagttggagtgacagaaaccctctccttcttggggaccattcccttctgcaccatgcagacgaggaaggaccgagctcagggttatgcagtggtcaggggcatcactgggggaccctggattcagggggttctccctactgaaggaggaaagacagaggagcagatggcagaggctctgtaaaggaaggaggctgcagcctggagggcatcagcttcccgcactcccaacctgctgcctctctctgctggaatgaggaggggccttctgactgggggtctccagggtggagggaggagctcacattctcagcattcctgggaccctgagttgcaaggaagacctggtgagcatgctgaccccagaggagtgactcaggcccatggctcgagtggctgagtagggaccagggttggggatcgggcatgagtcagcctggcaggtcccatgagaaggggaggggagggagagaaatgggggctgcacaggtgtgaggatctgtgcatgtctgtgtggtggtggtggggtgtctggatatctgtgtgttctggatctgagtgttagtgtatccgtcagcacaacctctgtgtgagggtgtgccttggcgagggtggacttctgtggatgtcccatgtgtggtgtgtgtgtgtgtgtgtgtgactaaatatatttccttcagcttggattctgtcccaatatgtgtttggatctttatagcatgtctctctctctacgtttcttaggggttgcccgtgtgtgggtgtctgtgtgtgtgcgcatgatggagtgtaccagtgtcagcctgtgtctgtccctcttttttgtgtttgtgtgttcacagctgggactcactgtatgaaagtaaagtgtgcctggagggtagtgggtttggggctatggtgcacacctctctgtatggaggtggtagtgtcagcccacaggtgtgcagctatgggtgtgagagtgtcctagtgagagcttgtgttcccttgcagaatcagaacgtgtccatggataacttgtgtttcttaccaccttttttcccccttattttttttcaagataagctcccgctgtgtaacccaggctggagtgcagtactgtgatcatggctcactgtagcctccacctcctgggctcaagcaatcctcctacctcagcaccctcccacccctcaagcagctgggactataggcatgtgccaccatacccagatagtttttgaattttttggtagagacagagtctcgccatgttgcccaggctgctcttgaactcctggcctcaagtgatcctcccgcctcggcctcccaaagtgttgggatttacaggcgtgagccactgctctcaaccctcagcctcttaccagctttctgtgtgtgtccatagatgtctctgtggcgtgtgtgtatatgtcacagggtaagcatgttggtgtatgactgtagtcacagacctgtgtgtgtgtgtgtgtgtgtaacagcaccctctgcttctctctggtctccctgtgtgtgcactggcccctgctgcctctgagtacatgacctaaggatgcttaccagtcagcgtatagatgtgtctctgtgtcaatctatgtgtccatggcagtgtctccatccttgtgtgtctgcatcaggcctgcgcatctacgaaactgtgtttttttgttttttggggtttttgttttgagacggagtctcactctgtcacccaagctggagtgcagtggcacgatcttggcttactgtaacttccgcctccggggttcaagggattctcctgcctcagcctcctgaggagctgcgattacaggcacgcctggcttatttttgtatttttagtaaagacagggtttcatgacaggtttgtcatgttggccaggctggtctcaaactcctgacctcaagtgatccaccggcctcggcctcccaaagtactgggattacaggcgtgagccaccgcacccagcgcaaatgtgtttttgtatcagtctgtgtctgggtgaacatgaaacctgggcgcatccagctccatcttatggcgtagatggaggcttggctgtgaggtgtacgcgtcggtgtgtctgtgtctgagcaggtcaaaatgacccttcattgtgtcctggtgtgtatctatctgtccacctcaactccatgtacgctgttacgtggtgtgtgtctctgaatatacagggacatttaagtttctgtgtgtgttggcatcagcctagatgtacattgcgtcgctaggtgtttgtaatcaatgtgtacatgtgtgactgtgtgtttatgtgtttgtcccacgttggcttgtatgcatacatgtctctttatgaatgtacatcagtgtcagcccgcgtgtatatgtgtgagtcacggtgtttttgtgtcactgtgtttgtgacatcagcccttgcatatctgtgtgccgttaacttaccaagcgctgcgtcttctgtgctaataacagcccctgtgtgtttaagtgtgattcattgtgagtgtgtgtgtgggggggtttgctgtgtgaaggaatttcgtccgtttgtgtgcgtctgtccctctatctgactcagggcgtgcccctcctccttccatccctctcattctctggaaaagctggggcggagagcaggggttgtggggggatggtcaggacatctggaaagcacatctggaatcggcctgctcctgtcgtcttgcggtaaagcaagaaccttctggaggggaaggggtcccagttcctcctgtccccttcactcaaggtgcggccgttggggcctgggaagggggatcccggctctggctccgcgcccccgaagccggccggaagcgctggggtggggaggtgcccccggtgactcacgcgggggcaggaatgctgcggtcggaacgggacccggctccagaacccacctccagccccagggcttctccggccggcggcgccagctcccgcgcgctgaccctggcggggccccacgtgccaggtggctggacccgacccaggctccccgcccccactcgggccgcccgcccgggactgtactgtttctcctccgggcggcgcgggggctgcgggcgcggggccttcagggcgcggaggctgcgggagcgggcacctgaccttgtctgggaacggccacctaggaagccgcgactgaggagctcccctaccctcccctttccggcctctgcagactttgcaccattccactccctccgctgacggagaaaaggaaactttgtgtctgcggatggagagcctcccttgccaacgcggtgggaacagaggcgtacacgcacggagcaaacacgagagacacgtacacagatactcaacacatgcacgtacacaccatccacagatacacgcagggtcacaaacataccagctcagaaacacaaacacagatgcacaagcacacgcgtaaacaacacgcagaactgcagtcgcacttacaagacttggtcccagggccgggcaccgagtggctctgcctgcgatccagcactttgggaggccgaggcgggaggatcgcttggggccagaagtttgagagcagcctgggcaacgtggtgagactctcctcttctctacaaaaaaaaattgaaaagttagccaagtgtggtggccgcctgtagtcccagctgcttgggaggatgagacaggaggatcgcttgagccctggaggtcaaggcagcagtgagccgtgattgtgccactgtactgcagcctgggagatagagcaagaacctgtctcaaaaaacaaaacgaaaaacttggtccttcttacatcctagcgcagacattgtgtgtgtgtgctgggggaggggggtgtctatgtttctacgtgtatctgtgttgggggattccccttattcaccaggatacgttctctaagagcccccacaaaagcctgaaacaatgaataatactaaaccctgtatatactacacataactttctttttccttcacaatttcgcagatagattgttttcttactatagatcttagcaacctcagtacatatatatatgattatctttttctaagtggagaattttcaccttttcacttaaaaggaagcactttaaggcttctctttggcctatccgaattgcagccatcactattttgcaccctggggccttttttttttttttttagacagagtctctctctgtcgcccaggctggagtgcagtgtggcgaccttggctcactgcaacctccgcagcccgggttctagcagttatcgtgcctcagcctcccgagtagctgggattacaggcacgcgccaccatgcccggctgatttttttgtatttttagtagagacgggggtttcactgtgttgcccaggcttgtcttaaactcctaatctcaagtgatccacccgcctcggcctcccaaagtgctgggattacagatgtgagccatagcacccggccaggcgattatttagataaataagagtttcttgaactctgcacttgagcactgcagtaccaggacagttgatctgatagctaagtgacttacagacaggtatcagatacagcactgagatgctggacaaaggggggattcacgttctaggccaaccagagtgggatggcatgaggtttcatcacagtactcagaacggcatgcaatttaaaacttaggagttatatctggaattttccattgaaatatttttagaccaagtgtaactgaaacctcaaaaagtgaaacctcggataaagggggactgatgtacgttgtatagcggtttgtgttgggtatctctgtgtgcttgcaggtctgtgtctctcgtgtttgtctctgtaattgtacgtgcttctgtgtgtgcacgctggtcataccaacaccaacaccaccacgttagggagggaaggcaatccaccttcactcgaaaacagttactcaaggccgggcacggtggctcacacctgtgatcccagcactttgggaggctgagatgggcagatcacttgaggtcaggagttcgagaccagcctggccaacatggtgaaaccctatctctactaaaaattacaaaaattagccgggcatggtggcgcgctcctgtaatcccagctactcagaaggctgaggcaggagaatggcttgaacccaggaggcagaggttgcagtgagccaagatcatgccactgcactttagcctgggcaacagagcaagactctcaaaaaacaaaagaaaaaaacagtcaagacacaatacgtgaactcccctatggaattacacatgctcatatttctacacctatgcccaggaatgctcataagtacatagctgaacacaatttcactcactcattcaacaagcatttatggcacacctattgtgtgccaggccatcctgacacagcaggggacgaaacagacacaacccctgccctcctagagctgacattctagtgggagaaactgacaatgggcaaggtacttgggtaacaggtaaagtatgttgggtgatgagaagaaccaaagaggaaaagtaaagcgggaaggggatagatttggagaggaagctccaattagctccaattttattgtattttttctttctttctttgtcttttcttttctttcttttttttttgagacagagtttcactcttgttgcccaggctggagtgcaatggcgtgatctcagctcactgcagcctctgcctcccgggttcaagctattctcctgcctcagcctcctgagtagctgggattaaaggggcctgccactatgcccagctaattttttgtatttttagtagagacgaggtttcactatgttggccaggctggtctcgaacttcggacctcaggtgatccacccacctcggcctcctaaggctgggattacgggcatgaaccaccgtgcccagcctttatttttcattttattatttttagtttttttgagacagggtctcactctgtcacccaggttggagtgcagtggtgtgatcacagctcactgcagcctccacctccccgggcacaggtagtcctcccacctcagcctcccaagtagctgggactacaggtgtgcaccaccacacccagctaatttttctcttttttgtagagatggggtctcaccacgttgcccaggctggtctctaactcctggcctcaagcgatcctcctgactcagcctcccaaagtgctgggattacagtcatgagtcactatgcctggccaagctccaatattaacagggtggccaggcctagcggactgagaggtgttgttgaggaacaaaaatgaaagaagagggtgcgagtcatgtagacatttgtggaagactgttttgagcacagggaacagtgcacagttcttggagtggaaacatgcttcatgtatgtgttccagagacactggaggccagtgtggccggagaagagcgtgtgacagggagagtgggagaggggttggtaggaggcgagcttagagatgaacagacatgtctccattgatgtacagccatgggccagtttccctaagtgtgtctagcaggtgtgtgtgctcatacttgtgtccttgtgagttagtgagggtgcctgtgtttgtgcatgtgagtgtgtgcatgtttgtgtgtctccttgtgtgtgtgtgtctgtgtatgcttttgtgtgtctatgtgtgagtatgtatatatgtgtctatgtccatatatatgagcacgtgtatttctgtgtgtgtctatatatgtgtatatgagtatgtgagtatctaggtgtacgaatctgtgtgtgtgagacacagtgtgtgtgtgtggctgtgtctgtttctgtgtctgtgtctgtgtctgtgtgtgagcatatgtgtttatatgtgtgtgtatgagtatgtgtctctggggtgtaagaatgtgtgtgtgtgcctgtgtgtgactgtgtgtgagtctgtgtgagcatgtgtgtgtatgagtatgtatctctctctggggtgtaagaatgtgtgtgtgtgtgtgtatgcgcctgtgcctgtgtgtgtgtctgagcatatgtgtctatgtgtgtgtatgagtgtgtgtctctatctggggtgtaagagtgagtgtgcctgtgactgtgtgtggttgtgtgtcttcatgtgtgtttgtgtatgtgtgtttttgtgtgtgtatgcctgtgcctgtgtgtggctgtgtgtctttgtgtgtgtctgtgtctgtgtgtctgtgtgtatgagtgtgtgtgcctgtgcctgtgtgtggctgtgtgtgtctttgtgtgtttctgtgtgagtatgtgtgtctatgtgtgtgtatgagtgtgtctgtctctggggtgtaagaatgtgtgtgtgagacagtgtgtgtgcctgtgcctgtgcctgtgtgtgtctgtgtgtgtctgtactatgtgtgtctgtgtggcgggaggttagggctgaaaccaagccatccttgtgtttggggatggaggctgtgttcctaactcattgccctcaactctgctaaccctcccttcaggcaagtgcctgtgtgggctgcactgcccctggtcaggcaggccatggtaggagtggcccggcatggccccggagcccttcctgcccctctctgatattggacccttccctcatatgactccctagggctgaacaagacatcctctttctcctgcgaagcccataacgccaagggggtcaccacatcccgcacagccaccatcacaggtgacagagttgggaggtggggagctgggcgtcagagggtggggtttgggtccggggtcagagtgggggcagagagcagggtagggagctttgagcaaaggctccccagggtcaatctctcccgtttgtccacagtgctcccccagcagccccgtaacctccacctggtctcccgccaacccacggagctggaggtggcttggactccaggcctgagcggcatctaccccctgacccactgcaccctgcaggtgagactcccaaacttggttcatttcagtctcaggcctccttccacccacatccacaacccccatcctctccctgggaacccaccacttctcggccactgttgagaagcagtagagcctggggggttaagccagatgtcctgggttcgaatcctagctccaccaccttctggctgtgtgaccttgggtaggtggcttaatctgtccggggctcagctctcttgtctacaaaatggacataatggtagtgcctacctggtatgcttagtgtgaaaattcaatgagtgaatgcaaattaccaacttaaaatggtatatagaacataggaaacaaatttaacaaaattggccaggcgcggtggctcacacctgtaatcccagcactttgggaggccgaggtgggcggatcacttgaggtcaggagttcgagaccagcctggccaacatagtgaaaccacatttctactaaaaatacaaaaattaactgggcctggtgggacgcacttgtagtcccagctactggggaggctgaggcaggagaattgcttgaacctgggaggcggaggttgcagtgagccaagatcgtgccactgctctccagcctgggtgacagagcgagactctgtctcaaaaaaaaaaaagaaacaacaacaaaaaaaatttaacaaaatgaaaatgatcagctgttttaattattttcagtattagtgatgttaactctagccagagtgggagccctgagacagcagagtctggagccatttctgtcaccactggatacccagaaccctccacttctcccatcccagccctggccactctgtgtggtcactgtctggggatgggtctgtcccctactggaatgtgagctctgacagggcagggctggagctgtcccagtcaccactggctcctcattcttgcccagcacaggaccagacatagagtagggaatattcgctagaaggatatattacaacccagatgagctagacccagcctctgccctcaagttgctcctagaataagaaaaccaaaaccaggccaggtgtggtggcttacacctgtaaccccagcactttgggaggccaaggctggtggatcacctgaggtcaggagttcgagaccagcctggctaacatggtgaaaccccatttctactaaaaatacaaaaaattagccgggtgtggtggcacacacctgtaatcccagctactcaggaggctgaggcaggagaatcccttgaaccctggaggcagaggttgcagtgagccgagatcgtgccattgcactccagcttgggtaacacgagcgaacttccgtctcaagaaaaaaaaaaaaagaaagaaagaaagaagaaaaccaaaaccaaaacaaaactcacagatctgtaaatataaggcctaattctggtctgaagttctctgagattagaaagttggagatggggggtggacagtgcctatgatggtagatgacagtaatgaagaatgaccaatttctactgagtgtccgctgtgcaccgggtcttgcattaacgcacacctgctcgtgtgtttgtgaaggagggtctatggatacacccattttccagatgaagaaactaaggctcagagtggttaaccagattgtccaaggtcacatcaaacccatgtcatgctcctaacctccttagaaactgttttttgttttttcttttcttttttttttgagacagagtctcgctctgttacccagactggagtgctgtggcgtgatcacggcttattgcaacctccgcctcctaggttcaagcaattctcttgcctcagcctcctgagtagctggtattacaggcgcccaccaccacgcccagctaatttttgtatttttagtagagacagggtttcaccatgttggtcaggctggtctcgaactcttgacctcaagtgacccgcccacctcggcctcccaaagtgctgggattacaggcgtgaggcaccgcgctgggccctgagaaaatgtttagagtcagtgcttgattaaacaggaattgtcttatacttacatgctctgagcacaaccccatctgcttgtcgttttaaacctagaaaatagtggctattggctgggcatgatagctcacgcctgtaatcccagcacttcggggggctgaggcaggtctgtacaaaaaattcaaaaaaattagctcagtgtggtggcacacacctgtagtcccagatactcgggaggctgaagtgggacaatcacctgagcctggcagtcaaggctacagtgaggcaggattgaacctctgctctccagcttgggtgacagagtaagactctgtctgagaaaaaaaaaaacaaaaaacagtggctattaatcttcccgttttcaaggtgaggaactgaggcccagagaggggccccctctctgggcctcagttcctcccatcctcctcccctccccggggctagaaagccgaagctgagattcaatcccagaggccagctggatttgggagacctcaaatgccaggtcaggcataagttgcactctacccacatcaccaagtgtccccaggaaagcagaagtgtgtcctcttccctttccaggtctcacttcctgctgcacatgggctagggctgaagagttccagtgggagggtcacagccgtcccagggaaaagagaagtgggagcaggcatggggagaccaactgtctgtacccatctcctctctgtcctggtagaggttcctcttcctgtctgtcactgcaggtcagagagcaggcatggtgacagcctcaccccctcctcgtacccaccatctgcccccactcctccccaggtctcatggtggtgtcatctccctccatgggggctgtgtgactttgggcaagttgctgaacctctctgggccttggcttccctgtctgtaaaatggggatgagaaaagaaattgaccccatagggtggtagtgcgaagtcaatgagttcatccagtaatgtgcttgacagagagcttggtacatatttggcactcaagaaatatttgctaggccgggtgccatggctcacacctgtaatactagacctttgggaggccgaggcaggtggatcgcttgagcccaggagtttgagacctgcctggccaacatggtgaaacgccatctctccaaataattaaaaaattaggtggggctgtcattacaccactgcactccagcttgtgtgacagagtgagaccctgcctaaaaaaaagaaaaaagaaaaagaaagaaagaaagaaaacaaacgttagctgttgataattataatgtgcaaagcagtttatatgcatcatgtcattaaaccttataccctgacaagtaagaactgtgatgcccattttccagagacagaaactgagactcagagaagttaagacactcactctaggtcacacagcaaacaacatccaacacaggacttagatccaaggaatctggctttagagcccacaccctgtggcagtaaactccttcctgacatactgtgtggctgtatggctggagtctccagggtgaaggggaagcccttggctgcaccattcctgaggcgtggctgtgaattgtgtggttatgggggttttgtggttccatgtggcagggctatacagatgtgtacaccagtggtggccccctccactctgagtgtgccattcctcgggtggaataggtatgggaacctgtgccgctatgcagagcttgacacttgttgccaggaaacacacataaaataataagtgacaggccgggcacggtggctcgtgcctgtgatcccagcactttgggaggctgagcgggcagatcacctgaggtagggagtttgagaccagcctgaccaacatggagtaaccctgtctctactaaaaatacagaattagccgggtgtggtggtgcatgcctgtaatcctagctactcaggaggttgaggcaagagaatcacttgaacctgggaggcggaggttgcagtgagccgagatcatgccattgtactccagcctgggcaacaagagcgaaactccatctcaaataaataaataaataaatagatagatagatagatagatagatagatagatagatagataataaatgacagtatgcacaagcagtcttctaaatgcttacatgccccaattcagtcaaccctgtgaagtggggagccactgtcatcccattttacaggtgagaagactgaggcacacagctagggaatgatagagcctggatttgagccccagatccagcatccgtgctcctcagcactaggctaaactgcctctgtgcacagacaagaggtattgttaccattactgatattcttaccgccagtagagcaaagactctggggacaggatggggtttaggtcccagcttcatcagtgacaaactgatgaccttgaacaagtgattccgtctctctgggcctcagtgttgtcatctgtacagtgggaataagcataatgcttaccacaggacaacaggattgatgtgagggccaaatgaattcagatttgtcaagggctaagaaaggcactcagtacatgttggacgtgttttatctttttttattaagataatatataacatagtcaggtgaggtggctcacgcctgtaatcccagcactttgggaggccgaggcaggtggattacctgaggtcaggagtttgagaccagcctgggcaacatggtgaaaccctttctctacacagaataaaaaaaaagccgggtgtggtagctcacacctgtaatcccagcactttgggaggccgaggggggcggatcacttgagatcaggagttcaagaccagcctgaccaacatgatgaaacctcgtctctactaaaaatacaaaaaagttagccaggcatggtggcacatgactgtagccccagctactcgagaggctgaagcagaagaattacttgagcccaggaggcggaggttgcagtgagccgagattgtaccactgcactccaacctgagtgacagagcaagactctgtctaaaaaaaaaaaaaaaaaaaaattagtcaagcatggttgctcacgcctgtaatcccatctacttgggaggccgaggcatgagaattgcctgaacctgggaggcggagattgcagtgagccgaaatcacgccactgcactccagctcaggtgatgaaatgagactcataggccgggcacggtggctcacacctgtaatcccagcactttgagaggctgaggcgggcggattgcctgaggtcaagagtttgagaccagcctgactaacatggtgaaacgctgtctctactgaaaatacggcaattagtcgggcgtggtggtacgcgtagtcccagctacttgggaggctgaggcagaagaattgcttgaacctaggagacggaggttgcagtgagccaagatctcaccactgcactatagcctgggcgacagagcaagactccctctccaaaaaaaggaaaaaaaaaaaaaaagaaaaagaaatgagatgtataacatgcataatcttcagtgtacctctagatcaagctcgtctaacacatgtggcccaggatggctttgaatgcggcccaacataagttcgtaaactttcttaaaacattatgagatttgtttgtgatttttttttttaacgcatcagctatcgttagtgttagcgtattttatgtgtggcccaagacaattcttcttccactgtggtccaagaaagtcaaaagattggacacctttgagattgtttaacacacatattcaccatgtaaccaccatccaaatcaagacacagacccttccagtccccaagaagtctccctcaggccccagagatggccacccttctgcttctagaacattgcttttgcctgtagtataatgtcatataaatggggcctcacagtatcgtgctattattatgatgatcattactattatttgagacagagtcttgctctgttacccaggctggagtgcagtggtgtgatcttagctcactgtaacctctgcctcccaggttcaagtggttctcctatcgcagcctcccgagtagctgggattacaggcgagcgccaccacatccagctaattttttacatttttggaagagatggggtttcaccacgttggccaggctggtcttgaactcctaacctcaagtgatcgcccaccttggcctcccaaagtgctgggattacaggcgggagccaccgtgcccagtctatttgcgttattattgtcatcacactattattatcggtgctgaccacccgccatgcactgtggcatcctttgggcataactacacttaatctttaaacaatcctgtaaggcacttgatcctctaaggccccgtgtgcccaaggaaaaaactgaggctcagagagggaagagtcttgccagaggtggcttttggaagtggtgacagaaccacattgtatacagccaaatgatctccttgctttgcaaatccaggtgcccgtgttatcctagcatggcactgcaacacacacgcacccttgaaaagttgtgtagtcacaccagaccaccaccactgggagctgtgtgaccatctcgtgtgattgcttggctgtcccgtcctcacacccttgcctctcctcaggctgtgctgtcagacgatgggatgggcatccaggcgggagaaccagaccccccagaggagcccctcacctcgcaagcatccgtgcccccccatcagcttcggctaggcagcctccatcctcacaccccttatcacatccgcgtggcatgcaccagcagccagggcccctcatcctggacccactggcttcctgtggagacgccggagggaggtaagaagggttggggagggacacgtcaccactgccccaccggaccttgcttatatcagtgccacccccattgtcccctttcactcctttacccctcatggcctcaatctccttcccatccaatctctgacccctcagcagcactgcccgctggcctctctcccagcccttctctcccctgtgcttcctctcatgggaggcctgcacgagttgcccacgtgtgtgcccttggcaccctgcacccacttcctgggaacaggggagggggtcaggaagaggtgggggtgccagcttcccctcttccctgtcctccagtgcccctgggcccccctgagaacattagtgctacgcggaatgggagccaggccttcgtgcattggcaagagccccgggcgcccctgcagggtaccctgttagggtaccggctggcgtatcaaggccaggacaccccagaggtgggtgctgctggtgggattggagtggagtggcttggggaggagggaggagaacatatcagggcagacatagatggttgtgaaggttgggtagtacacaattgctctatgcctagggggcacattcagggaaggttcacattcacattctggggagaataagggggtctaagggagggcatggggaatggctgtttttgaaccactgcaaaagcatttcagcagactcatatttactatataacgattttacagcagatagttatatagcaccttggggaaggggtaccttttcctgattttcacaaaggcactcctatcagggctagcaataccctgacatagggagggaggatggaaagggaagctagaaggggatggagggatacaggttaaaggatgaggatgagagatgaaggggaggacgaggaaggatgaggagttggaggatggggagagcgttttgagaaagagatggggcattgagcccgagagtgaaggcttaacagctggggggtaaggttctaccctgatgccacttctggacctcctaggtgctaatggacatagggctaaggcaagaggtgaccctggagctgcagggggacgggtctgtgtccaatctgacagtgtgtgtggcagcctacactgctgctggggatggaccctggagcctcccagtacccctggaggcctggcgcccaggtaagtccaaagccatgcccaacctgcttcaaccctgtctctccctgacagccctgacttactccttgtacctttcagtgttaccgcaacttaggccctgttcctaccctgagccttactgagagctgccctcactcccttacccatgccaacccctcactcccttacctgtgccacggcctcactcctttacccgtgccacaccctcactcccttacccgtgccacaccctcactcccttacccgtgccaaaccttcactcccttactcgtgccacaccctcactcccttacccgtgccacacccttactcccttacccgtgccacgccagtcttgtcctctctgagcacatctcctctctgtcctttcttctcacagggcaagcacagccagtccaccagctgggtaagggcttccacaccccatctcctccttccctaccctcaacacctagtgggggcactgtcaccatgcatactcattgcacatccctttcatgtttctctaactcatcactctaacctacttcttgagtttgtgtggtccttgatggaggtgcctataatggcctagcatagcacattgtaggtattcaggcaatgacagatgagtgggtggatggatgaacaaatagatggatggatggatggatagatatatggagggtggatgggtgggtgggtcaatggatgaatagaggatggataggcgggtgaacagataaatgactggatgtcgagtggataaatggatgggtagatggatgggtggatggatggatgggtggatatatggagaatggatgggtgtgtgggccaatggatgaatagagggtggataggtgggtgaacagataaatgactggatggtgagtggataaatggatgggtagatggatgggtggatggatgggtgggtggatatatggagggtggatggatggatggttggatatatggagggtggatgggtgggtgggtcaatggattaatagatgggtggataggtggatgaacaaaagatgactgggtggtgagtggatatatggatgggtagatgggtggatggatggatggatggatggatgaatggatggttggataaatggatggatggacagatggatggatttgtgagtggatgaatggatgggtagaaaggtggatggatggatgaatgaggtatcctcctcacatccatccctctcaaatatttctctaacaattctcaaacattcctcctacacccattgtcccctctgggcactattatggttcactcttgtaactcaacccactagccttcaatactcctcacatcccttcctacatttcttcacatacgctttccacgcttattccaccctcctttcacatatatcccattataatccgttcctcccacatgaccccaaaggcccattgcacaacacacttctcattcacaaactctgcacaccttgtatgcacttaccataccttccacattgcaaacactgaaaaacattgtccacaactttcccacacccgattctccttgcatgcttactgcacactccatagacatcattccctcacccttcactaatcccaacccatctcactctgcacactcaccctgaaccccttgcatactcagcacataatgatctttatttcttacacactccattccacccctgccctttttacaccccctttctgtgcaccccatacttctcatctgcccttctaacatcttttgcatgctcactgcacacttctctcacactgcaattacatccttaaaattccttgctcactccttgtatctaagacttcacgaatactcttcccacttcacacacccccaacttttccagcagccatccaaccctgtatatgcttaccatgcccctttggatatttatttcaccctcattcctggctttatggaaaccattgtggccgggtgcaatggctcacgcctgtaatcccagtactttgggaggcctgagacaggtggatcacctgaggtcaggagttcaagaccagcctggccaacattggcgaaaacccatctctactaaaaatacaaaaattagctgggcctggtggtgcgagcctgtaatcccagctgctcgggaggctgaggcacaagaattgcttgaacctgggaggcggaggttacagtgagccaagatcatgccactatactccagcctgggcaacacagcaagactctgtctcaaaaaaaaaaaaaaaagaaagaaagaaagaaaaaaagaaagaaaagaaaaagaaaagaaaaaaaaattagccaggtggcacagacctgcagtcccagctactcaggagacatggtgaaaccctgtctctaccaaaaaaagaatacaaaaattagctgggcatggtggtgcacacctgtaatcccagctacttagaagctgaggcaggagatttgcttgaaactgggaggcagaggttgcaatgagctgagaccgggccactgcactccagcctgggtgaaagagtgagaccctgtctcaaaaaacaaacaaacaaaaaaagagacaaagaaaacccttttgtagtcattgcattctcttcaaaagatgttccttagtccgccctccttgcacacgcttcatgcaccatcctacactgcaaggatcttcttccccactcacctgcttatctacactctagtccacccttcttgcacaatcatcacatttctcacactaacctatgctgcttgagatttctccacacccatctcatgttcatctagccctcttggcacactcataacgcgttccacacatctctccctcccattccacactcactgcacactcctcaaatatccattccactcttctgtttttttggatcttggtggcataatatttggtagcttaaagtaaggaaaactgcaaacgcccaaacagagacttgaaccctgaaccctcaggttaaaagtctgatgctctaccacctgaactatcctggcactctcttttttttttttttttttttttttttgagatggagtcttgctctgtcacccaggatggagtgcagtggcccagtctcggctcactgaaacctccacctcccaggttcaagcaattctcctgcctcagctcccgagtagctgggattgcaggtgtgcaccaccaccccagctaatttttgtatatattttgtttaagtagagacagggtttcatcatgtcggccgggctggtcttgaactccttgcctcaagtaacccacccgccttggcctcccaaagtgctgggataacaggcatgagccaccacacctggcctccatcccactcttaactcacccatcctacaactttcacacacttctgctttaacctgcacttgtatcacatccattgcatgccctgtccagcccagcccattcagatatgtgaatgcatccatcacacacctcatcaagtatgtgcacatctttgccgaggccttctgcctccctcccacatcacccctttgggtcccagagagctggatccaaggcttcatccatgacctgttcctcataccccctgatagtgaaggaaccttcaactcctgccttctcgtggccctggtggtatgtactgctaggagcagtcgtggccgctgcctgtgtcctcatcttggctctcttccttgtccaccggcgaaagaaggagacccgttatgggtgagttggaaccacatggggaggctgtgtggcctgggatggagaggctggaggcagggaggccagtgaggaggctggtgcaggaggagtgatgactaagaatcagaatgagggcaagggaagccaggcgtggtggctcacgcctgtaatcccagcactttgggaggctgaagcaggtggatcacttgaggtcaggagtttgagaccagcctggccaacatggcgaaaccctgtctctactgaaaaatgcaaaaattagcgggaagtgtaggcacacgcctgtggtcccagctacttgggaggctgaggcacgataatcacttgaacccgggagatggaggctacagtgagctgagatcgcatcactgcactccagcctgggtgacagagtgagatcctgttttcaaaaaaaagaatgagggcaagggggtgtgtggaatgaatggaaggcagaaggtagctgcccaaggcatgctcagcaaatgttagcacagagggcaggcagggcttgaggctgagatggtgcttgctcaactgctggttgagtagggggttccacatggtttttccctgccctcacctactccccctcccccccagagaagtgtttgaaccaacagtggaaagaggtgaactggtagtcaggtaccgcgtgcgcaagtcctacagtcgtcggaccactgaagctacctgtaagtgaaccctatgccccactgccctggcctggatctaaaggctgtagagaatctggcctgctgggcttctgtacatgtgtgagccaaaagtttctaaaggccttgggatactagaatgtcagaaccacagaccctagaaataacagatttgtggaaccacaaagaactttcaaggaatagaatcttagacacagtaaatcttagaaacaccaaggctgggtgtggtggctcatgcctgtaatcctagcgcttcggggggccgaggtgggaggatcacttgagcccaggagttcgagaacagcctgggcagcatggtgaaaccctgtctctacaaaaaaaaaaaattagccaggtatggtggtgtgcccctgtactccctgctactcgggaggctgaggtaggaggatcacctgagcccagggaggtcaaggctgcagtaagccgtgatcacaccactgcactccagcctgggtgacagagcaagaccctgtctcaaaaaagaaaaaaaaataaaagaaagaaaagaaacaccaaacctcagagccattggatcttagaagatgtaatgatgatgataatgatgaagataatgacaagaagaaaatgatgatgatgatgaaataatgttgagattagatggtgatgatgtgataaaaatcacaggcaaccctagcactacctatgtggcaggctctgttctaagcattctacatgtatctcctcgtttaaccctcagagcaacccaaggacacgggtttcttttttctttttttttctttttttttttgagacagagtctcgctctgttgcccaggctggagcacagtggcacaatctcagctcactgcaaccttcacctcccaggttcaagtgattcttatgcctcggcctcccgaatagctgggattacaagtgcatggcaccacatctggctaatttttgcatttttagtaaagatggggttttactaaccctgtctttgttagccaggctggtcttggaactcctggcctcaagtgatcaacctgccttggcctcccaaagtgctgggataacaggcgtgagccaccacgcccagccagaggtgggtttcttatcaccttcacttcacagatgaggaagctgtggcatagagtggttaagtcacttgcccaaggccacacagcttgtaaattggatagctgggatttgaacccaggtacttttgctctgaagtctatactattttttttttttttttgatagaatcttgctctgtcacccaggatggagtgcagtggcttgatcttggctcactgcaacctccgcctcctggattcaagcgactctcctgcttcagcctctcaagtagctgggactacaggcacatgccacaacgcctggctaatttttgtagttttaatagagacaaggtttcaccatattggccaggctggtctcgacctcctgaacccgtgcctcccaaagtgctgggattacaggtgtgagccaccacgcctggcctgaagtctatactctgaactgccacactctactacctcttggaattataaattggtagagagatagaatcgatcttggcctgaaaaattatatgcatgtactctacacccttatacttttgaaatcataaaatcttagaactatagactctccattagaaggctggaaagccatgcaaggtctcagccgaggaggggatctcagaggcccagtcaaatctgttctttcggctgggtgcagtggctcacgcctgtaatctcaacactttgggaggcccaggcgggcagacacttgaggtcaggagttcgagaccagcctggccaacatggcgagaccctgtctctactaaaaatacaaaaattagccagatgtaatctgtaatcccagctacttgggaggctgaggcaggagaatctcttgaacctgggaggcggaggttgcagtgagccgagatcgtgccactgcacttcagcctgggtgatagagcaagacaccgtctcaaaaaaaaaaaaaaaaaaaaggaatctcatctttccagttagggaaactgaaatccagaaagaaaatggaagagctaggtctcttcctagcatacagcgagaaagccgccagggccccagggggatgtttggaaagggctgggaaagacatttatttaagaagagaaggaagaagcaacgatgtcccagtgatttaactgagtaacatacagcatccattctcagggtgtgagcctggtcccctgtggtccctgagacctttgcagggggcccataaggtcaaatctattttcatactattaccaagacattatttgcccttttgctttctcattctctcattagcattcagcgcagttttccagaggctccctgacgtgggatgatgtcatccaacactctgacagctgatggaccttgtgcttgtatattcttgttttaaaaatttatcaggctgggcatagtggcacatgcctgtaatcccaccactttgggaggccaaggtgggcaaattgcttgaggtcaggagtttgagaccagcctgaccaacatggtgaaaccccatttctactaaaatacaaaaattagctgggtgtggtggtgcatgcctgtaatcctagctacttgggaggctgaggaaagagaatcgcttgaacccgggaggcggatgttgcagcaagctgaggttgtaccactggacttcagcctgggcaacagagtgagactgtctcaaaaaaaaaaaaaattaaataaacctgataggttttcttttgaggccaggagtttgaaaccagtgtgggcaacatggcaaaaccccatctctatttaaaaaaaaaaaaagaaacacaaaaatttgccaggtgtggtggtgtacacctataattccagctgctcaggagggtgaggcaggggaatcacttgaacctgggaggcggaagttgcagtgagctgagattatgctactgcactctagcctaggcaacagagcgagactcggtttcaaaaaaaatttttttatttttttagagatggggtctggctatgttgcccaggctgatctccaactccaggcctcaactggtcctccttccttggcctcccaagttgctgggtgaaccactgtgaaccactgtgcccagctagttttatttttgaatacagaaatattgatatatatgtaacataaacaaaagctctttctagtcctcaataattctaacaatgtaaaggtgtcctgatgtcaatttgtttgagaatgattatataacaaagaaaatggataaattacaattacactcaacaactaaattaaaactatttcatagacatcatgttgagtgaaagaagccagacacaaaagagaatatactatgtgattccatttttataatatttcaaaactaatcgattgtaacagaaatcaagaaagtggctaccccaggagggcaggtcatgttctgttcttggcctgagtgctagttacacatttgtgtttgatttgtgaaaatccactgagttggccaggcgtggtggctcacgcttgtaatcccaacactttgggaggccaaggtgggcagatcacctgaggtcgggagttccagaccagcctgaccaacatggagaaaccccgtctctactaaaaatacaaaattagctgggcgtagtggcacatgcctgtacttgggaggctgaggcaggagaatcgcttgaacctgagaggcggaggttgcggtgagccgagattgcgccatcgcactccagcctgggcaacaggaacgaaactccatctcaaaaaaaaaaagaaaagaaaatccactgagttgcttacttatgatttgtgcagattatacttcaataaaaagaaatatttttgtgtgtgtgttttgtttgagatggggtcttgctctgtcacccaggctggggtgcagtggcatgagctcagcttactgcagcctccacccctgggctcaagtgatcctccaacctcagcctcctgagtagctgggactataggcgcgtaccaccacacatggctagcttttgtatttttttgtagagacggggattcgccatgttgcccaggctggttttgaattcctggactcaagtgatccaccggcctctgcctcccaaagtgctgcgattacaggcatgagccactgcatccagcaaaaagaaatatttttattttattttattttattttattttattttattttatttttgagacggagtcttgccctgtcacccaggctggagtgaagtggtgcgatctcagctcattgcaacctctgtctcttgggttcaagtgattttcctgcctcagcctccccagtagctgggactacaggcatgtgccaccacacacggctaatttttgtatttttttgtagagacagagattcgccatgttgcccaggctggtcttgaactcctggactcaagtgatccacctgcctctgcctcccagagtgctgggattacaggcgtaagccactgtgcccagcaaaagaaatatttttaacaactggtacagcagggcactgacccatcagggtgcccactggagcaagagcgtggccaggctttaccccttgagttccctttgagggaaggttcagggggtccagaggaggagctggggtggaagtagaggggtgctcagggcagttgctaattttaaatcagtgcagaagtatgtcagtgtttcaacaatggatctatccctactggtgggtgaatgtcacctgaatgtcagccctgctccatgactctgtccaccccaaccttgcatgcagtgaacagcctgggcatcagtgaagagctgaaggagaagctgcgggatgtgatggtggaccggcacaaggtggccctggggaagactctgggagagggtgagtcccccggcagcatacacacatccttctgaacttctgagatcctgcacttccacactcccacccaactataggaaatacagtccccacgggccctctgaggtcagtgtctccctctggccccccacaggagagtttggagctgtgatggaaggccagctcaaccaggacgactccatcctcaaggtggctgtgaagacgatgaagagtgagttacgtgcacatgtgtaggacccccagctccttccctatgcccctgagacagaagagagcaagcaagttagccatagcttagaacttctggtgtttccagataggcaatggagcccctgccaggtacctcaatagaaggaattgaatatggggagattagtacaaaggtgggagacgggttgaaggaacaactgggggcagggagggaaaccagagatgagcagcagcaggaagtcacttcccccgctaggcctgaagggtagagggagcaagtggtgttaccagaatccacagctagggacaccaggcaggagctggtatcacagagttagaggctgctctgtgggagctaaaaacccagaatagcactttgggaggccgaggcagcagatcgcttgagtccaggagtttgagaccagcctaggcaatatggtgaaaccacatgtctatgaaaaaaaaaataataatagtaacaaaaaattagctgggcatggtggcacacgcctgtagtcccagctacttgggacactgaggtgggagaatcacttgagtctgtgcggcagaggttgcagtcagctatgatcatgccactgcactccaatctgggtgaca
